(19) United States
(12) Patent Application Publication
(10) Pub. No.: US 2019/0330626 A1
(43) Pub. Date: Oct. 31, 2019

(54) COMPOUNDS AND METHODS FOR USE IN DYSTROPHIN TRANSCRIPT

(71) Applicant: Ionis Pharmaceuticals, Inc., Carlsbad, CA (US)

(72) Inventors: Frank Rigo, Carlsbad, CA (US); Thazha P. Prakash, Carlsbad, CA (US); Punit P. Seth, Carlsbad, CA (US)

(73) Assignee: Ionis Pharmaceuticals, Inc., Carlsbad, CA (US)

(21) Appl. No.: 16/310,749

(22) PCT Filed: Jul. 17, 2017
(86) PCT No.: PCT/US2017/042464

§ 371 Date: Dec. 17, 2018

Related U.S. Application Data
(60) Provisional application No. 62/363,191, filed on Jul. 15, 2016.

(51) Int. Cl. C12N 15/113; A61K 9/00

(52) U.S. Cl. CPC C12N 15/113; A61K 9/0019; C12N 2310/113; C12N 2320/33; C12N 2310/315; C12N 2310/3341; C12N 2310/3515; C12N 2310/321

(57) ABSTRACT

Provided herein are methods, compounds, and compositions for modulation of dystrophin pre-mRNA in an animal. Such methods, compounds, and compositions are useful, for example, to treat, prevent, or ameliorate one or more symptoms of Duchenne Muscular Dystrophy disease.

### SEQUENCE LISTING

[0001] The present application is being filed along with a Sequence Listing in electronic format. The Sequence Listing is provided as a file entitled BIOL0301WOSEQ_ST25.txt created Jul. 17, 2017, which is 2.82 Mb in size. The information in the electronic format of the sequence listing is incorporated herein by reference in its entirety.

### FIELD OF THE INVENTION

[0002] Provided herein are methods, compounds, and compositions for modulation of dystrophin pre-mRNA in an animal. Such methods, compounds, and compositions are useful, for example, to treat, prevent, or ameliorate one or more symptoms of Duchenne Muscular Dystrophy disease.

### BACKGROUND

[0003] Duchenne Muscular Dystrophy (“DMD”) is a disease characterized by progressive muscle degeneration and weakness. Children are usually diagnosed between the ages of 2 and 3 when progressive weakness of the legs and pelvis is observed. The muscle weakness spreads to the arms, neck, and other tissues, and most patients require a wheelchair before age 12 or 13. A patient's muscles will continue to deteriorate, resulting in full paralysis and eventually death, usually in the early to mid-20s.

[0004] DMD is caused by a lack of the dystrophin protein. The dystrophin protein is part of a protein complex important for maintaining muscle strength and stability. The gene that encodes dystrophin protein is over two million nucleobases in length and contains 79 exons. Any number of mutations in the dystrophin gene can result in the loss of functional dystrophin protein and cause DMD.

[0005] For example, certain mutations in the dystrophin gene cause a frameshift in the translation of dystrophin mRNA. The frameshift will result in little to no production of functional dystrophin protein, and cause DMD. Some mutations however, typically a deletion of one or more exons from the dystrophin gene, will result in an in-frame dystrophin protein that is missing one or more exons. Usually, in-frame dystrophin protein that lacks one or more exons retains some functionality and results in a far less severe form of muscular dystrophy known as Becker muscular dystrophy (“BMD”).

[0006] Antisense oligonucleotides have been used to modulate splicing of pre-mRNA containing a mutation that can be mitigated by altering splicing. For example, antisense oligonucleotides have been used to modulate mutant dystrophin splicing (Dunckley et al. Nucleosides & Nucleotides, 1997, 16, 1665-1668). However, antisense oligonucleotides have historically had poor uptake in muscle tissues. Developing antisense oligonucleotides for inducing exon skipping of dystrophin pre-mRNA has been challenging because it requires that antisense oligonucleotides (1) induce skipping of a dystrophin exon during pre-mRNA processing, and (2) achieves activity in muscle cells. Therefore, antisense compounds having improved exon skipping activity and/or uptake in muscle tissue are needed.

### SUMMARY

[0007] The present disclosure provides compounds, methods, and compositions for modulation of dystrophin pre-mRNA in an animal. The present disclosure also provides compounds, methods, and compositions useful, for example, to treat, prevent, or ameliorate one or more symptoms of Duchenne Muscular Dystrophy.

[0008] In certain embodiments, the present disclosure provides oligomeric compounds comprising or consisting of modified oligonucleotides complementary to a dystrophin pre-mRNA and having one or more 2′-O—(N-alkyl acetamide) modified sugar moieties. In certain embodiments, the present disclosure provides oligomeric compounds comprising or consisting of modified oligonucleotides complementary to a dystrophin pre-mRNA and having one or more 2′-O—(N-methyl acetamide) modified sugar moieties. In certain embodiments, the present disclosure provides oligomeric compounds comprising or consisting of modified oligonucleotides complementary to a dystrophin pre-mRNA and having one or more 2′-MOE modified sugar moieties. Modified oligonucleotides having one or more 2′-O—(N-alkyl acetamide) or 2′-O—(N-methyl acetamide) modified sugar moieties have enhanced cellular uptake and/or pharmacologic activity in muscle tissue. Modified oligonucleotides having one or more 2′-O—(N-alkyl acetamide) or 2′-O—(N-methyl acetamide) modified sugar moieties also have enhanced pharmacologic activity for modulating splicing of pre-mRNA. Since dystrophin is expressed in muscle tissue and skipping exons with frameshift mutations ameliorates one or more symptoms of DMD, modified oligonucleotides having one or more 2′-O—(N-alkyl acetamide) or 2′-O—(N-methyl acetamide) modifications have improved activity for modulating splicing of dystrophin pre-mRNA in muscle tissue.

[0009] Further provided herein are methods of enhancing cellular uptake, methods of enhancing pharmacologic activity and methods of modulating tissue distribution of oligomeric compounds comprising or consisting of a conjugate group and a modified oligonucleotide comprising 2′-O—(N-alkyl acetamide) or 2′-O—(N-methyl acetamide) modified sugar moieties. Certain conjugate groups described herein can enhance cellular uptake and/or pharmacologic activity in muscle tissue. In certain embodiments, attaching such conjugate groups to modified oligonucleotides having one or more 2′-O—(N-alkyl acetamide) or 2′-O—(N-methyl acetamide) modifications can further improve activity for modulating splicing of dystrophin pre-mRNA in muscle tissue.

### DETAILED DESCRIPTION

[0010] It is to be understood that both the foregoing general description and the following detailed description are exemplary and explanatory only and are not restrictive of the embodiments, as claimed. Herein, the use of the singular includes the plural unless specifically stated otherwise. As used herein, the use of “or” means “and/or” unless stated otherwise. Furthermore, the use of the term “including” as well as other forms, such as “includes” and “included”, is not limiting.

[0011] The section headings used herein are for organizational purposes only and are not to be construed as limiting the subject matter described. All documents, or portions of documents, cited in this application, including, but not limited to, patents, patent applications, articles, books, treatises, and GenBank and NCBI reference sequence records are hereby expressly incorporated by reference for the portions of the document discussed herein, as well as in their entirety.

[0012] Unless otherwise indicated, the following terms have the following meanings:

[0013] As used herein, “dystrophin pre-mRNA” means an RNA sequence, including all exons and introns, transcribed from DNA encoding dystrophin. In certain embodiments, dystrophin pre-mRNA comprises any of SEQ ID NO: 218, 219, 220, 223, 224, 225, 226, and/or 227. In certain embodiments, dystrophin pre-mRNA comprises SEQ ID NO: 228. In certain embodiments, dystrophin pre-mRNA consists of SEQ ID NO: 228.

[0014] As used herein, “2′-deoxyribonucleoside” means a nucleoside comprising 2′-H(H) furanosyl sugar moiety, as found in naturally occurring deoxyribonucleic acids (DNA). In certain embodiments, a 2′-deoxyribonucleoside may comprise a modified nucleobase or may comprise an RNA nucleobase (uracil).

[0015] As used herein, “2′-substituted nucleoside” or “2-modified nucleoside” means a nucleoside comprising a 2′-substituted or 2′-modified sugar moiety. As used herein, “2′-substituted” or “2-modified” in reference to a sugar moiety means a sugar moiety comprising at least one 2′-substituent group other than H or OH.

[0016] As used herein, “antisense activity” means any detectable and/or measurable change attributable to the hybridization of an antisense compound to its target nucleic acid. In certain embodiments, antisense activity is a decrease in the amount or expression of a target nucleic acid or protein encoded by such target nucleic acid compared to target nucleic acid levels or target protein levels in the absence of the antisense compound.

[0017] As used herein, “antisense compound” means a compound comprising an antisense oligonucleotide and optionally one or more additional features, such as a conjugate group or terminal group.

[0018] As used herein, “antisense oligonucleotide” means an oligonucleotide having a nucleobase sequence that is at least partially complementary to a target nucleic acid.

[0019] As used herein, “ameliorate” in reference to a treatment means improvement in at least one symptom relative to the same symptom in the absence of the treatment. In certain embodiments, amelioration is the reduction in the severity or frequency of a symptom or the delayed onset or slowing of progression in the severity or frequency of a symptom.

[0020] As used herein, “bicyclic nucleoside” or “BNA” means a nucleoside comprising a bicyclic sugar moiety. As used herein, “bicyclic sugar” or “bicyclic sugar moiety” means a modified sugar moiety comprising two rings, wherein the second ring is formed via a bridge connecting two of the atoms in the first ring thereby forming a bicyclic structure. In certain embodiments, the first ring of the bicyclic sugar moiety is a furanosyl moiety. In certain embodiments, the bicyclic sugar moiety does not comprise a furanosyl moiety.

[0021] As used herein, “branching group” means a group of atoms having at least 3 positions that are capable of forming covalent linkages to at least 3 groups. In certain embodiments, a branching group provides a plurality of reactive sites for connecting tethered ligands to an oligonucleotide via a conjugate linker and/or a cleavable moiety.

[0022] As used herein, “cell-targeting moiety” means a conjugate group or portion of a conjugate group that results in improved uptake to a particular cell type and/or distribution to a particular tissue relative to an oligomeric compound lacking the cell-targeting moiety.

[0023] As used herein, “cleavable moiety” means a bond or group of atoms that is cleaved under physiological conditions, for example, inside a cell, an animal, or a human.

[0024] As used herein, “complementary” in reference to an oligonucleotide means that at least 70% of the nucleobases of such oligonucleotide or one or more regions thereof and the nucleobases of another nucleic acid or one or more regions thereof are capable of hydrogen bonding with one another when the nucleobase sequence of the oligonucleotide and the other nucleic acid are aligned in opposing directions. Complementary nucleobases means nucleobases that are capable of forming hydrogen bonds with one another.

[0025] Complementary nucleobase pairs include adenine (A) and thymine (T), adenine (A) and uracil (U), cytosine (C) and guanine (G), 5-methyl cytosine (^{m}C) and guanine (G). Complementary oligonucleotides and/or nucleic acids need not have nucleobase complementarity at each nucleoside. Rather, some mismatches are tolerated. As used herein, “fully complementary” or “100% complementary” in reference to oligonucleotides means that such oligonucleotides are complementary to another oligonucleotide or nucleic acid at each nucleoside of the oligonucleotide.

[0026] As used herein, “conjugate group” means a group of atoms that is directly or indirectly attached to an oligonucleotide. Conjugate groups include a conjugate moiety and a conjugate linker that attaches the conjugate moiety to the oligonucleotide.

[0027] As used herein, “conjugate linker” means a group of atoms comprising at least one bond that connects a conjugate moiety to an oligonucleotide.

[0028] As used herein, “conjugate moiety” means a group of atoms that is attached to an oligonucleotide via a conjugate linker.

[0029] As used herein, “contiguous” in the context of an oligonucleotide refers to nucleosides, nucleobases, sugar moieties, or internucleoside linkages that are immediately adjacent to each other. For example, “contiguous nucleobases” means nucleobases that are immediately adjacent to each other in a sequence.

[0030] As used herein, “double-stranded antisense compound” means an antisense compound comprising two oligomeric compounds that are complementary to each other and form a duplex, and wherein one of the two said oligomeric compounds comprises an antisense oligonucleotide.

[0031] As used herein, “fully modified” in reference to a modified oligonucleotide means a modified oligonucleotide in which each sugar moiety is modified. “Uniformly modified” in reference to a modified oligonucleotide means a fully modified oligonucleotide in which each sugar moiety is the same. For example, the nucleosides of a uniformly modified oligonucleotide can each have a 2′-MOE modification but different nucleobase modifications, and the internucleoside linkages may be different.

[0032] As used herein, “gapmer” means a modified oligonucleotide comprising an internal region having a plurality of nucleosides comprising unmodified sugar moieties positioned between external regions having one or more nucleosides comprising modified sugar moieties, wherein the nucleosides of the external regions that are adjacent to the internal region each comprise a modified sugar moiety. The internal region may be referred to as the “gap” and the external regions may be referred to as the “wings.”

[0033] As used herein, “hybridization” means the pairing or annealing of complementary oligonucleotides and/or nucleic acids. While not limited to a particular mechanism, the most common mechanism of hybridization involves hydrogen bonding, which may be Watson-Crick, Hoogsteen or reversed Hoogsteen hydrogen bonding, between complementary nucleobases.

[0034] As used herein, “inhibiting the expression or activity” refers to a reduction or blockade of the expression or activity relative to the expression of activity in an untreated or control sample and does not necessarily indicate a total elimination of expression or activity.

[0035] As used herein, the terms “internucleoside linkage” means a group or bond that forms a covalent linkage between adjacent nucleosides in an oligonucleotide. As used herein “modified internucleoside linkage” means any internucleoside linkage other than a naturally occurring, phosphate internucleoside linkage. Non-phosphate linkages are referred to herein as modified internucleoside linkages. “Phosphorothioate linkage” means a modified phosphate linkage in which one of the non-bridging oxygen atoms is replaced with a sulfur atom. A phosphorothioate internucleoside linkage is a modified internucleoside linkage. Modified internucleoside linkages include linkages that comprise abasic nucleosides. As used herein, “abasic nucleoside” means a sugar moiety in an oligonucleotide or oligomeric compound that is not directly connected to a nucleobase. In certain embodiments, an abasic nucleoside is adjacent to one or two nucleosides in an oligonucleotide.

[0036] As used herein, “linker-nucleoside” means a nucleoside that links, either directly or indirectly, an oligonucleotide to a conjugate moiety. Linker-nucleosides are located within the conjugate linker of an oligomeric compound. Linker-nucleosides are not considered part of the oligonucleotide portion of an oligomeric compound even if they are contiguous with the oligonucleotide.

[0037] As used herein, “non-bicyclic modified sugar” or “non-bicyclic modified sugar moiety” means a modified sugar moiety that comprises a modification, such as a substitutent, that does not form a bridge between two atoms of the sugar to form a second ring.

[0038] As used herein, “linked nucleosides” are nucleosides that are connected in a continuous sequence (i.e. no additional nucleosides are present between those that are linked).

[0039] As used herein, “mismatch” or “non-complementary” means a nucleobase of a first oligonucleotide that is not complementary with the corresponding nucleobase of a second oligonucleotide or target nucleic acid when the first and second oligomeric compound are aligned.

[0040] As used herein, “MOE” means methoxyethyl. “2′-MOE” means a —OCH₂CH₂OCH₃ group at the 2′ position of a furanosyl ring.

[0041] As used herein, “motif” means the pattern of unmodified and/or modified sugar moieties, nucleobases, and/or internucleoside linkages, in an oligonucleotide.

[0042] As used herein, “naturally occurring” means found in nature.

[0043] As used herein, “nucleobase” means a naturally occurring nucleobase or a modified nucleobase. As used herein a “naturally occurring nucleobase” is adenine (A), thymine (T), cytosine (C), uracil (U), and guanine (G). As used herein, a modified nucleobase is a group of atoms capable of pairing with at least one naturally occurring nucleobase. A universal base is a nucleobase that can pair with any one of the five unmodified nucleobases. As used herein, “nucleobase sequence” means the order of contiguous nucleobases in a nucleic acid or oligonucleotide independent of any sugar or internucleoside linkage modification.

[0044] As used herein, “nucleoside” means a compound comprising a nucleobase and a sugar moiety. The nucleobase and sugar moiety are each, independently, unmodified or modified. As used herein, “modified nucleoside” means a nucleoside comprising a modified nucleobase and/or a modified sugar moiety.

[0045] As used herein, “2′-O—(N-alkyl acetamide)” means a —O—CH₂—C(O)—NH-alkyl group at the 2′ position of a furanosyl ring.

[0046] As used herein, “2′-O—(N-methyl acetamide)” or “2′-NMA” means a —O—CH₂—C(O)—NH—CH₃ group at the 2′ position of a furanosyl ring.

[0047] As used herein, “oligomeric compound” means a compound consisting of an oligonucleotide and optionally one or more additional features, such as a conjugate group or terminal group.

[0048] As used herein, “oligonucleotide” means a strand of linked nucleosides connected via internucleoside linkages, wherein each nucleoside and internucleoside linkage may be modified or unmodified. Unless otherwise indicated, oligonucleotides consist of 8-50 linked nucleosides. As used herein, “modified oligonucleotide” means an oligonucleotide, wherein at least one nucleoside or internucleoside linkage is modified. As used herein, “unmodified oligonucleotide” means an oligonucleotide that does not comprise any nucleoside modifications or internucleoside modifications.

[0049] As used herein, “pharmaceutically acceptable carrier or diluent” means any substance suitable for use in administering to an animal. Certain such carriers enable pharmaceutical compositions to be formulated as, for example, tablets, pills, dragees, capsules, liquids, gels, syrups, slurries, suspension and lozenges for the oral ingestion by a subject. In certain embodiments, a pharmaceutically acceptable carrier or diluent is sterile water; sterile saline; or sterile buffer solution.

[0050] As used herein “pharmaceutically acceptable salts” means physiologically and pharmaceutically acceptable salts of compounds, such as oligomeric compounds, i.e., salts that retain the desired biological activity of the parent compound and do not impart undesired toxicological effects thereto.

[0051] As used herein “pharmaceutical composition” means a mixture of substances suitable for administering to a subject. For example, a pharmaceutical composition may comprise an antisense compound and a sterile aqueous solution. In certain embodiments, a pharmaceutical composition shows activity in free uptake assay in certain cell lines.

[0052] As used herein, “phosphorus moiety” means a group of atoms comprising a phosphorus atom. In certain embodiments, a phosphorus moiety comprises a mono-, di-, or tri-phosphate, or phosphorothioate.

[0053] As used herein, “phosphodiester internucleoside linkage” means a phosphate group that is covalently bonded to two adjacent nucleosides of a modified oligonucleotide.

[0054] As used herein, “precursor transcript” means a coding or non-coding RNA that undergoes processing to form a processed or mature form of the transcript. Precursor transcripts include but are not limited to pre-mRNAs, long non-coding RNAs, pri-miRNAs, and intronic RNAs.

[0055] As used herein, “processing” in reference to a precursor transcript means the conversion of a precursor transcript to form the corresponding processed transcript. Processing of a precursor transcript includes but is not limited to nuclease cleavage events at processing sites of the precursor transcript.

[0056] As used herein “prodrug” means a therapeutic agent in a form outside the body that is converted to a different form within the body or cells thereof. Typically conversion of a prodrug within the body is facilitated by the action of an enzymes (e.g., endogenous or viral enzyme) or chemicals present in cells or tissues and/or by physiologic conditions.

[0057] As used herein, “RNAi compound” means an antisense compound that acts, at least in part, through RISC or Ago2 to modulate a target nucleic acid and/or protein encoded by a target nucleic acid. RNAi compounds include, but are not limited to double-stranded siRNA, single-stranded RNA (ssRNA), and microRNA, including microRNA mimics. In certain embodiments, an RNAi compound modulates the amount, activity, and/or splicing of a target nucleic acid. The term RNAi compound excludes antisense oligonucleotides that act through RNase H.

[0058] As used herein, the term “single-stranded” in reference to an antisense compound means such a compound consisting of one oligomeric compound that is not paired with a second oligomeric compound to form a duplex. “Self-complementary” in reference to an oligonucleotide means an oligonucleotide that at least partially hybridizes to itself. A compound consisting of one oligomeric compound, wherein the oligonucleotide of the oligomeric compound is self-complementary, is a single-stranded compound. A single-stranded antisense or oligomeric compound may be capable of binding to a complementary oligomeric compound to form a duplex.

[0059] As used herein, “splicing” means the process by which a pre-mRNA is processed to form the corresponding mRNA. Splicing includes but is not limited to the removal of introns from pre-mRNA and the joining together of exons.

[0060] As used herein, “sugar moiety” means an unmodified sugar moiety or a modified sugar moiety. As used herein, “unmodified sugar moiety” means a 2′-OH(H) furanosyl moiety, as found in RNA (an “unmodified RNA sugar moiety”), or a 2′-H(H) moiety, as found in DNA (an “unmodified DNA sugar moiety”). Unmodified sugar moieties have one hydrogen at each of the 1′, 3′, and 4′ positions, an oxygen at the 3′ position, and two hydrogens at the 5′ position. As used herein, “modified sugar moiety” or “modified sugar” means a modified furanosyl sugar moiety or a sugar surrogate. As used herein, modified furanosyl sugar moiety means a furanosyl sugar comprising a non-hydrogen substituent in place of at least one hydrogen of an unmodified sugar moiety. In certain embodiments, a modified furanosyl sugar moiety is a 2′-substituted sugar moiety. Such modified furanosyl sugar moieties include bicyclic sugars and non-bicyclic sugars. As used herein, “sugar surrogate” means a modified sugar moiety having other than a furanosyl moiety that can link a nucleobase to another group, such as an internucleoside linkage, conjugate group, or terminal group in an oligonucleotide. Modified nucleosides comprising sugar surrogates can be incorporated into one or more positions within an oligonucleotide and such oligonucleotides are capable of hybridizing to complementary oligomeric compounds or nucleic acids.

[0061] As used herein, “target precursor transcript,” mean a precursor transcript to which an oligonucleotide is designed to hybridize. In certain embodiments, a target precursor transcript is a target pre-mRNA. As used herein, “target processed transcript” means the RNA that results from processing of the corresponding target precursor transcript. In certain embodiments, a target processed transcript is a target mRNA. As used herein, “target pre-mRNA” means a pre-mRNA to which an oligonucleotide is designed to hybridize. As used herein, “target mRNA” means a mRNA that results from the splicing of the corresponding target pre-mRNA.

[0062] As used herein, “terminal group” means a chemical group or group of atoms that is covalently linked to a terminus of an oligonucleotide.

### Duchennes Muscular Dystrophy

[0063] The present disclosure provides compounds, methods, and compositions for modulation of dystrophin pre-mRNA in an animal. The present disclosure also provides compounds, methods, and compositions useful, for example, to treat, prevent, or ameliorate one or more symptoms of Duchenne Muscular Dystrophy.

[0064] DMD is caused by a lack of the dystrophin protein. The dystrophin protein is part of a protein complex important for maintaining muscle strength and stability. The gene that encodes dystrophin protein is over two million nucleobases in length and contains 79 exons. Any number of mutations in the dystrophin gene can result in the loss of functional dystrophin protein and cause DMD. Certain mutations in the dystrophin gene cause a frameshift in the translation of dystrophin mRNA. The frameshift will result in little to no production of functional dystrophin protein, and thereby cause DMD.

[0065] Some mutations, typically a deletion of one or more exons from the dystrophin gene, will result in an in-frame dystrophin protein that is missing one or more exons. Usually, in-frame dystrophin protein that lacks one or more exons retains some functionality and results in a far less severe form of muscular dystrophy known as Becker muscular dystrophy (“BMD”). Modified oligonucleotides designed to induce skipping of exons containing mutations that cause a frame shift can restore the reading frame and produce functional dystrophin protein lacking the mutated exon and thereby ameliorate the DMD phenotype.

[0066] Modified oligonucleotides described herein can induce skipping of one or more exons that have been identified as containing frame shifting mutations. For example, the modified oligonucleotides described herein can induce skipping of exon 2, 8, 43, 44, 45, 46, 50, 51, 52, or 53. In certain embodiments, modified oligonucleotides target a region within exon 2, 8, 43, 44, 45, 46, 50, 51, 52, or 53. In certain embodiments, modified oligonucleotides target an intron-exon junction of exon 2, 8, 43, 44, 45, 46, 50, 51, 52, or 53. In certain embodiments, modified oligonucleotides target the intron adjacent to and upstream of exon 2, 8, 43, 44, 45, 46, 50, 51, 52, or 53.

[0067] The present disclosure describes oligomeric compounds comprising or consisting of modified oligonucleotides complementary to a dystrophin pre-mRNA; and comprising at least 6 modified nucleosides each having a structure independently selected from Formula II:

[chemical structure]

[0068] wherein for each nucleoside of Formula II:
[0069] Bx is a nucleobase;
[0070] R¹ is independently selected from among: CH₂OCH₃ and C(═O)NR²R³, wherein R² and R³ are each independently selected from among: hydrogen and methyl, or R² is hydrogen and R³ is selected from among: methyl, ethyl, propyl, and isopropyl.

[0071] Nucleosides of Formula II in which R¹ is C(═O)NR²R³, and one of R² or R³ is hydrogen and the other of R² or R³ is methyl are “2′-O—(N-methyl acetamide)” or “2′-NMA” modified nucleosides, as shown below:

[chemical structure]

[0072] In certain embodiments, modified oligonucleotides comprising at least 6 modified nucleosides independently selected from Formula II have increased distribution into muscle tissue and also have increased activity for inducing exon skipping. Certain nucleobase sequences targeted to dystrophin pre-mRNA are exemplified in the non-limiting Tables A-K below. In certain embodiments, oligomeric compounds comprise a modified oligonucleotide having any of the nucleobase sequences in Tables A-K and comprising six or more modified nucleosides of Formula II. In certain embodiments, oligomeric compounds comprise a modified oligonucleotide having any of the nucleobase sequences in Tables A-K and comprising six or more 2′-O—(N-alkyl acetamide) modified sugar moieties. In certain embodiments, oligomeric compounds comprise a modified oligonucleotide having any of the nucleobase sequences in Tables A-K and comprising six or more 2′-O—(N-methyl acetamide) modified sugar moieties. In certain embodiments, oligomeric compounds comprise a modified oligonucleotide having any of the nucleobase sequences in Tables A-K and comprising six or more 2′-MOE modified sugar moieties.

[0073] In certain embodiments, oligomeric compounds comprise a modified oligonucleotide having any of the nucleobase sequences in Tables A-K and comprising six or more modified nucleosides of Formula II and a conjugate group. In certain embodiments, oligomeric compounds comprise a modified oligonucleotide having any of the nucleobase sequences in Tables A-K and comprising six or more 2′-O—(N-alkyl acetamide) modified sugar moieties and a conjugate group. In certain embodiments, oligomeric compounds comprise a modified oligonucleotide having any of the nucleobase sequences in Tables A-K and comprising six or more 2′-O—(N-methyl acetamide) modified sugar moieties and a conjugate group. In certain embodiments, oligomeric compounds comprise a modified oligonucleotide having any of the nucleobase sequences in Tables A-K and comprising six or more 2′-MOE modified sugar moieties and a conjugate group.

[0074] The sequences of Table A are complementary to human dystrophin pre-mRNA, the complement of GENBANK NT_011757.15 truncated from nucleotides 28916001 to 31142000 (herein referred to as SEQ ID NO: 228). The sequences of Tables B-K are complementary to certain regions of human dystrophin pre-mRNA, as indicated for each table.

TABLE A
Sequences Targeted to DMD

| | | | SEQ ID |
|---|---|---|---|
| Sequence | Length | Exon | NO: |
| CCCAUUUUGUGAAUGUUUUCUUUU | 24 | 2 | 3 |
| CUUCCUGGAUGGCUUCAAU | 19 | 8 | 4 |
| GUACAUUAAGAUGGACUUC | 19 | 8 | 5 |
| CUGUAGCUUCACCCUUUCC | 19 | 43 | 6 |
| CGCCGCCAUUUCUCAACAG | 19 | 44 | 7 |
| UUUGUAUUUAGCAUGUUCCC | 20 | 44 | 8 |
| CCGCCAUUUCUCAACAG | 17 | 44 | 9 |
| UUCUCAGGAAUUUGUGUCUUU | 21 | 44 | 10 |
| GUUGCAUUCAAUGUUCUGAC | 20 | 45 | 11 |
| GCUUUUCUUUUAGUUGCUGC | 20 | 46 | 12 |
| UCCAGGUUCAAGUGGGAUAC | 20 | 46 | 13 |
| UUCCAGGUUCAAGUG | 15 | 46 | 14 |
| AGGUUCAAGUGGGAUACUA | 19 | 46 | 15 |
| CUCAGAGCUCAGAUCUU | 17 | 50 | 16 |
| UCAAGGAAGAUGGCAUUUCU | 20 | 51 | 17 |
| CCUCUGUGAUUUUAUAACUUGAU | 23 | 51 | 18 |
| UGAUAUCCUCAAGGUCACCC | 20 | 51 | 19 |
| GCUGGUCUUGUUUUUCAA | 18 | 52 | 20 |
| CTGCTTCCTCCAACC | 15 | 46 | 21 |
| GTTATCTGCTTCCTCCAACC | 20 | 46 | 22 |
| GCTTTTCTTTTAGTTGCTGC | 20 | 46 | 23 |
| TTAGTTGCTGCTCTT | 15 | 46 | 24 |
| TTGCTGCTCTTTTCC | 15 | 46 | 25 |
| CCACAGGTTGTGTCACCAG | 19 | 51 | 26 |
| TTTCCTTAGTAACCACAGGTT | 21 | 51 | 27 |
| TGGCATTTCTAGTTTGG | 17 | 51 | 28 |
| CCAGAGCAGGTACCTCCAACATC | 23 | 51 | 29 |
| GGTAAGTTCTGTCCAAGCCC | 20 | 51 | 30 |
| TCACCCTCTGTGATTTTAT | 19 | 51 | 31 |
| CCCTCTGTGATTTT | 14 | 51 | 32 |
| TCACCCACCATCACCCT | 17 | 51 | 33 |
| TGATATCCTCAAGGTCACCC | 20 | 51 | 34 |
| CTGCTTGATGATCATCTCGTT | 21 | 51 | 35 |
| GCCAUUUCUCAACAGAUCU | 19 | 44 | 36 |
| UCAGCUUCUGUUAGCCACUG | 20 | 44 | 37 |
| UUUGUAUUUAGCAUGUUCCC | 20 | 44 | 8 |
| AUUCUCAGGAAUUUGUGUCUUUC | 23 | 44 | 38 |
| CCAUUUGUAUUUAGCAUGUUCCC | 23 | 44 | 39 |
| UCUCAGGAAUUUGUGUCUUUC | 21 | 44 | 40 |
| GCCAUUUCUCAACAGAUCUGUCA | 23 | 44 | 41 |
| GCCGCCAUUUCUCAACAG | 18 | 44 | 42 |
| GUUCAGCUUCUGUUAGCC | 18 | 44 | 43 |
| GUUGCCUCCGGUUCUGAAGGUGUUC | 25 | 53 | 44 |
| UUUGCCGCUGCCCAAUGCCAUCCUG | 25 | 45 | 45 |
| CUCUUGAUUGCUGGUCUUGUUUUUC | 25 | 52 | 46 |
| UCAAGGAAGAUGGCAUUUCU | 20 | 51 | 17 |
| UCAGCUUCUGUUAGCCACUG | 20 | 44 | 37 |
| GGUAAUGAGUUCUUCCAACUGG | 22 | 44 | 47 |
| UUUGCCGCUGCCCAAUGCCAUCCUG | 25 | 45 | 45 |
| AUUCAAUGUUCUGACAACAGUUUGC | 25 | 45 | 48 |
| CCAGUUGCAUUCAAUGUUCUGACAA | 25 | 45 | 49 |
| CAGUUGCAUUCAAUGUUCUGAC | 22 | 45 | 50 |
| AGUUGCAUUCAAUGUUCUGA | 20 | 45 | 51 |
| GAUUGCUGAAUUAUUUCUUCC | 21 | 45 | 52 |
| UUUGCCICUGCCCAAUGCCAUCCUG | 25 | 45 | 53 |
| CGACCUGAGCUUUGUUGUAG | 20 | 43 | 54 |
| CGUUGCACUUUGCAAUGCUGCUG | 23 | 43 | 55 |
| AGCAAUGUUAUCUGCUUCCUCCAAC | 25 | 46 | 56 |
| UCUUUUCCAGGUUCAAGUGG | 20 | 46 | 57 |
| GCUUUUCUUUUAGUUGCUGCUCUUU | 25 | 46 | 58 |
| GGAUACUAGCAAUGUUAUCUGCUUC | 25 | 46 | 59 |
| AUAGUGGUCAGUCCAGGAGCU | 21 | 50 | 60 |
| UCAAGGAAGAUGGCAUUUCUAGUUU | 25 | 51 | 61 |
| UUCCAACUGGGGACGCCUCUGUUCC | 25 | 52 | 62 |
| CUCUUGAUUGCUGGUCUUGUUUUUC | 25 | 52 | 46 |
| ACCUGCUCAGCUUCUUCCUUAGCUU | 25 | 53 | 63 |
| GAUAGGUGGUAUCAACAUCUGUAA | 24 | 8 | 64 |
| GAUAGGUGGUAUCAACAUCUG | 21 | 8 | 65 |
| GAUAGGUGGUAUCAACAUCUGUAAG | 25 | 8 | 66 |
| UAUGUGUUACCUACCCUUGUCGGUC | 25 | 43 | 67 |
| GGAGAGAGCUUCCUGUAGCU | 20 | 43 | 68 |
| UCACCCUUUCCACAGGCGUUGCA | 23 | 43 | 69 |
| CUCUUUUCCAGGUUCAAGUGGGAUACUAGC | 30 | 46 | 70 |
| CAAGCUUUUCUUUUAGUUGCUGCUCUUUUCC | 31 | 46 | 71 |
| CCACUCAGAGCUCAGAUCUUCUAACUUCC | 29 | 50 | 72 |
| CUUCCACUCAGAGCUCAGAUCUUCUAA | 27 | 50 | 73 |
| GGGAUCCAGUAUACUUACAGGCUCC | 25 | 50 | 74 |
| ACAUCAAGGAAGAUGGCAUUUCUAGUUUGG | 30 | 51 | 75 |
| ACAUCAAGGAAGAUGGCAUUUCUAG | 25 | 51 | 76 |
| CUCCAACAUCAAGGAAGAUGGCAUUUCUAG | 30 | 51 | 77 |
| UCCAACUGGGGACGCCUCUGUUCCAAAUCC | 30 | 52 | 78 |
| ACUGGGGACGCCUCUGUUCCA | 21 | 52 | 79 |
| CAUUCAACUGUUGCCUCCGGUUCUGAAGGUG | 31 | 53 | 80 |
| GCCGCTGCCCAATGC | 15 | 45 | 81 |
| CGCTGCCCAATGCCATCC | 18 | 45 | 82 |
| CAGTTTGCCGCTGCCCAA | 18 | 45 | 83 |
| TGTTCTGACAACAGTTTG | 18 | 45 | 84 |
| CTTTTAGTTGCTGCTCTTTTCC | 22 | 46 | 85 |
| TTTTCCAGGTTCAAGTGG | 18 | 46 | 86 |
| CTGCTTCCTCCAACC | 15 | 46 | 21 |
| GTTATCTGCTTCCTCCAACC | 20 | 46 | 22 |
| GAAAACGCCGCCATUUCT | 18 | 44 | 87 |
| CTGUTAGCCACTGATTAA | 18 | 44 | 88 |
| TGAGAAACTGTUCAGCUT | 18 | 44 | 89 |
| CAGGAATTUGTGUCUUTC | 18 | 44 | 90 |
| GTAUTTAGCATGUTCCCA | 18 | 44 | 91 |
| AGCATGTTCCCAATUCTC | 18 | 44 | 92 |
| GCCGCCATUUCUCAACAG | 18 | 44 | 93 |
| CATAATGAAAACGCCGCC | 18 | 44 | 94 |
| TUCCCAATUCTCAGGAAT | 18 | 44 | 95 |
| CCAUTUGTAUTTAGCATG | 18 | 44 | 96 |
| CTCAGATCUUCTAACUUC | 18 | 50 | 97 |
| ACCGCCTUCCACTCAGAG | 18 | 50 | 98 |
| TCTTGAAGTAAACGGTUT | 18 | 50 | 99 |
| GGCTGCTTUGCCCTCAGC | 18 | 50 | 100 |
| AGTCCAGGAGCTAGGTCA | 18 | 50 | 101 |
| GCTCCAATAGTGGTCAGT | 18 | 50 | 102 |
| GCTAGGTCAGGCTGCTTU | 18 | 51 | 103 |
| TGTGTCACCAGAGUAACAGT | 20 | 51 | 104 |
| AGGTTGUGUCACCAGAGTAA | 20 | 51 | 105 |
| AGTAACCACAGGUUGTGTCA | 20 | 51 | 106 |
| TTGATCAAGCAGAGAAAGCC | 20 | 51 | 107 |
| CACCCUCUGUGAUUUTATAA | 20 | 51 | 108 |
| ACCCACCAUCACCCUCTGTG | 20 | 51 | 109 |
| CCTCAAGGUCACCCACCATC | 20 | 51 | 110 |
| TAACAGUCUGAGUAGGAG | 18 | 51 | 111 |
| GGCATUUCUAGUUTGGAG | 18 | 51 | 112 |
| AGCCAGUCGGUAAGTTCT | 18 | 51 | 113 |
| AGTTTGGAGAUGGCAGTT | 18 | 51 | 114 |
| CTGATTCTGAATTCUUTC | 18 | 53 | 115 |
| TTCTTGTACTTCATCCCA | 18 | 53 | 116 |
| CCUCCGGTTCTGAAGGTG | 18 | 53 | 117 |
| CATTUCAUTCAACTGTTG | 18 | 53 | 118 |
| TTCCTTAGCTUCCAGCCA | 18 | 53 | 119 |
| TAAGACCTGCTCAGCUTC | 18 | 53 | 120 |
| CTTGGCTCTGGCCTGUCC | 18 | 53 | 121 |
| CTCCTUCCATGACTCAAG | 18 | 53 | 122 |
| CTGAAGGTGTTCTTGTAC | 18 | 53 | 123 |
| TTCCAGCCATTGTGTTGA | 18 | 53 | 124 |
| CTCAGCTUCTTCCTTAGC | 18 | 53 | 125 |
| GCTTCUTCCUTAGCUTCC | 18 | 53 | 126 |
| CTCCGGTTCTGAAGGTGTTCTTGTA | 25 | 53 | 127 |
| CCGGTTCTGAAGGTGTTCTTGT | 22 | 53 | 128 |
| CCTCCGGTTCTGAAGGTGTTCTTGT | 25 | 53 | 129 |
| TCCGGTTCTGAAGGTGTTCTTG | 22 | 53 | 130 |
| TGCCTCCGGTTCTGAAGGTGTTCTT | 25 | 53 | 131 |
| CCGGTTCTGAAGGTGTTC | 18 | 53 | 132 |
| CTCCGGTTCTGAAGGTGTTC | 20 | 53 | 133 |
| CCTCCGGTTCTGAAGGTGTTC | 21 | 53 | 134 |
| GCCTCCGGTTCTGAAGGTGTTC | 22 | 53 | 135 |
| UUGUACUUCAUCCCACUGAUUCUGA | 25 | 53 | 136 |
| UGUUCUUGUACUUCAUCCCACUGAU | 25 | 53 | 137 |
| GUUCUGAAGGUGUUCUUGUACUUCA | 25 | 53 | 138 |
| CCGGUUCUGAAGGUGUUCUUGUACU | 25 | 53 | 139 |
| UCCGGUUCUGAAGGUGUUCUUGUAC | 25 | 53 | 140 |
| CUCCGGUUCUGAAGGUGUUCUUGUA | 25 | 53 | 141 |
| UUCUGAAGGUGUUCUUGU | 18 | 53 | 142 |
| GGUUCUGAAGGUGUUCUUGU | 20 | 53 | 143 |
| CCUCCGGUUCUGAAGGUGUUCUUGU | 25 | 53 | 144 |
| UGUUGCCUCCGGUUCUGAAGGUGUUCUUGU | 30 | 53 | 145 |
| GCCUCCGGUUCUGAAGGUGUUCUUG | 25 | 53 | 146 |
| UGCCUCCGGUUCUGAAGGUGUUCUU | 25 | 53 | 147 |
| UUCUGAAGGUGUUCU | 15 | 53 | 148 |
| CGGUUCUGAAGGUGUUCU | 18 | 53 | 149 |
| UCCGGUUCUGAAGGUGUUCU | 20 | 53 | 150 |
| UUGCCUCCGGUUCUGAAGGUGUUCU | 25 | 53 | 151 |
| GUUGCCUCCGGUUCUGAAGGUGUUC | 25 | 53 | 44 |
| CCUCCGGUUCUGAAGGUGUU | 20 | 53 | 152 |
| UGUUGCCUCCGGUUCUGAAGGUGUU | 25 | 53 | 153 |
| CUCCGGUUCUGAAGGUGU | 18 | 53 | 154 |
| CUGUUGCCUCCGGUUCUGAAGGUGU | 25 | 53 | 155 |
| ACUGUUGCCUCCGGUUCUGAAGGUG | 25 | 53 | 156 |
| CAUUCAACUGUUGCCUCCGGUUCUGAAGGUG | 31 | 53 | 80 |
| UCCGGUUCUGAAGGU | 15 | 53 | 157 |
| UUGCCUCCGGUUCUGAAGGU | 20 | 53 | 158 |
| AACUGUUGCCUCCGGUUCUGAAGGU | 25 | 53 | 159 |
| UGCCUCCGGUUCUGAAGG | 18 | 53 | 160 |
| CAACUGUUGCCUCCGGUUCUGAAGG | 25 | 53 | 161 |
| UGUUGCCUCCGGUUCUGAAG | 20 | 53 | 162 |
| UGUUGCCUCCGGUUCUGA | 18 | 53 | 163 |
| UUGCCUCCGGUUCUG | 15 | 53 | 164 |
| CUGUUGCCUCCGGUUCUG | 18 | 53 | 165 |
| UCAUUCAACUGUUGCCUCCGGUUCU | 25 | 53 | 166 |
| UUGGCUCUGGCCUGUCCUAAGACCU | 25 | 53 | 167 |
| CAAGCUUGGCUCUGGCCUGUCCUAA | 25 | 53 | 168 |
| CAGCGGTAATGAGTTCTTCCAACTG | 25 | 52 | 169 |
| ATTTCTAGTTTGGAGATGGCAGTTTC | 26 | 51 | 170 |
| CATCAAGGAAGATGGCATTTCTAGTT | 26 | 51 | 171 |
| GAGCAGGTACCTCCAACATCAAGGAA | 26 | 51 | 172 |
| ACATCAAGGAAGATGGCATTTCTAGTTTGG | 30 | 51 | 173 |
| CTCCAACATCAAGGAAGATGGCATTTCTAG | 30 | 51 | 174 |
| TCAAGGAAGATGGCATTTCT | 20 | 51 | 175 |
| ACATCAAGGAAGATGGCATTTCTAG | 25 | 51 | 176 |
| CCAGAGCAGGTACCTCCAACATC | 23 | 51 | 29 |
| TGGCATTTCTAGTTTGG | 17 | 51 | 28 |
| CAGAGCTCAGATCTTCTAACTTCCT | 25 | 50 | 177 |
| CTTACAGGCTCCAATAGTGGTCAGT | 25 | 50 | 178 |
| ATGGGATCCAGTATACTTACAGGCT | 25 | 50 | 179 |
| AGAGAATGGGATCCAGTATACTTAC | 25 | 50 | 180 |
| CCACTCAGAGCTCAGATCTTCTAACTTCC | 29 | 50 | 181 |
| GGGATCCAGTATACTTACAGGCTCC | 25 | 50 | 182 |
| CTTCCACTCAGAGCTCAGATCTTCTAA | 27 | 50 | 183 |
| TACTTCATCCCACTGATTCTGAATT | 25 | 53 | 184 |
| CTGAAGGTGTTCTTGTACTTCATCC | 25 | 53 | 185 |
| CTGTTGCCTCCGGTTCTGAAGGTGT | 25 | 53 | 186 |
| CTGAAGGTGTTCTTGTACTTCATCC | 25 | 53 | 185 |
| CATTCAACTGTTGCCTCCGGTTCTGAAGGTG | 31 | 53 | 187 |
| CTGTTGCCTCCGGTTCTG | 18 | 53 | 188 |
| ATTCTTTCAACTAGAATAAAAG | 22 | 53 | 189 |
| GATCTGTCAAATCGCCTGCAGGTAA | 25 | 44 | 190 |
| ATAATGAAAACGCCGCCATTTCTCA | 25 | 44 | 191 |
| AAACTGTTCAGCTTCTGTTAGCCAC | 25 | 44 | 192 |
| TTGTGTCTTTCTGAGAAACTGTTCA | 25 | 44 | 193 |
| CCAATTCTCAGGAATTTGTGTCTTT | 25 | 44 | 194 |
| TGTTCAGCTTCTGTTAGCCACTGA | 24 | 44 | 195 |
| TTTGTGTCTTTCTGAGAAAC | 20 | 44 | 196 |
| CGCCGCCATTTCTCAACAG | 19 | 44 | 197 |
| ATCTGTCAAATCGCCTGCAG | 20 | 44 | 198 |
| GCCATCCTGGAGTTCCTGTAAGATA | 25 | 45 | 199 |
| CCAATGCCATCCTGGAGTTCCTGTA | 25 | 45 | 200 |
| CTGACAACAGTTTGCCGCTGCCCAA | 25 | 45 | 201 |
| TTTGAGGATTGCTGAATTATTTCTT | 25 | 45 | 202 |
| GACAGCTGTTTGCAGACCTCCTGCC | 25 | 45 | 203 |
| TGTTTTTGAGGATTGCTGAA | 20 | 45 | 204 |
| GCTGAATTATTTCTTCCCC | 19 | 45 | 205 |
| GCCCAATGCCATCCTGG | 17 | 45 | 206 |
| CCAATGCCATCCTGGAGTTCCTGTAA | 26 | 45 | 207 |

[0075] In certain embodiments, the present disclosure provides a modified oligonucleotide having a nucleobase sequence comprising at least 8 contiguous nucleobases of any of the nucleobase sequences of SEQ ID NOs: 175 or 188. In certain embodiments, the present disclosure provides a modified oligonucleotide has a nucleobase sequence comprising at least 12 contiguous nucleobases of any of the nucleobase sequences of any of SEQ ID NOs: 175 or 188. In certain embodiments, the present disclosure provides a modified oligonucleotide has a nucleobase sequence comprising the nucleobase sequences of any of SEQ ID NOs: 175 or 188.

[0076] Any of the nucleobase sequences in the tables below may be modified with six or more 2′-MOE modified sugar moieties and may also comprise a conjugate moiety. Any of the nucleobase sequences in the table below may be modified with six or more 2′-O—(N-alkyl acetamide) modified sugar moieties and may comprise a conjugate moiety. Any of the nucleobase sequences in the table below may be modified with six or more 2′-O—(N-methyl acetamide) modified sugar moieties and may comprise a conjugate moiety. The sequences below are targeted to target regions of dystrophin pre-mRNA.

TABLE B
Nucleobase sequences targeted to Exon 2 of
dystrophin pre-mRNA (SEQ ID NO: 218)

| | | | | | Seq |
|---|---|---|---|---|---|
| | SEQ | | | Seq | ID |
| | ID | | | ID 218 | 218 |
| Sequence | NO: | Length | Exon | Start | Stop |
| CCCAUUUUGUGAAUGUUUUCUUUU | 3 | 24 | 2 | 119 | 142 |

TABLE C
Nucleobase sequences targeted to Exon 8 of dystrophin
pre-mRNA (SEQ ID NO: 219)

| | SEQ ID | | | Seq ID 219 | Seq ID 219 |
|---|---|---|---|---|---|
| Sequence | NO: | Length | Exon | Start | Stop |
| GAUAGGUGGUAUCAACAUCUGUAAG | 66 | 25 | 8 | 94 | 118 |
| GAUAGGUGGUAUCAACAUCUGUAA | 64 | 24 | 8 | 95 | 118 |
| GAUAGGUGGUAUCAACAUCUG | 65 | 21 | 8 | 98 | 118 |
| GUACAUUAAGAUGGACUUC | 5 | 19 | 8 | 126 | 144 |
| CUUCCUGGAUGGCUUCAAU | 4 | 19 | 8 | 184 | 202 |

TABLE D
Nucleobase sequences targeted to Exon 43 of dystrophin
pre-mRNA (SEQ ID NO: 220)

| | SEQ ID | | | Seq ID 220 | Seq ID 220 |
|---|---|---|---|---|---|
| Sequence | NO: | Length | Exon | start | stop |
| CGACCUGAGCUUUGUUGUAG | 54 | 20 | 43 | 116 | 135 |
| CGUUGCACUUUGCAAUGCUGCUG | 55 | 23 | 43 | 162 | 184 |
| UCACCCUUUCCACAGGCGUUGCA | 69 | 23 | 43 | 178 | 200 |
| CUGUAGCUUCACCCUUUCC | 6 | 19 | 43 | 190 | 208 |
| GGAGAGAGCUUCCUGUAGCU | 68 | 20 | 43 | 201 | 220 |
| UAUGUGUUACCUACCCUUGUCGGUC | 67 | 25 | 43 | 263 | 287 |

TABLE E
Nucleobase sequences targeted to Exon 44 of dystrophin
pre-mRNA (SEQ ID NO: 221)

| | SEQ ID | | | Seq ID 221 | Seq ID 221 |
|---|---|---|---|---|---|
| Sequence | NO: | Length | Exon | Start | Stop |
| GATCTGTCAAATCGCCTGCAGGTAA | 190 | 25 | 44 | 91 | 115 |
| ATCTGTCAAATCGCCTGCAG | 198 | 20 | 44 | 95 | 114 |
| GCCAUUUCUCAACAGAUCUGUCA | 41 | 23 | 44 | 107 | 129 |
| GCCAUUUCUCAACAGAUCU | 36 | 19 | 44 | 111 | 129 |
| CGCCGCCAUUUCUCAACAG | 7 | 19 | 44 | 115 | 133 |
| CCGCCAUUUCUCAACAG | 9 | 17 | 44 | 115 | 131 |
| GCCGCCAUUUCUCAACAG | 42 | 18 | 44 | 115 | 132 |
| GCCGCCATUUCUCAACAG | 93 | 18 | 44 | 115 | 132 |
| CGCCGCCATTTCTCAACAG | 197 | 19 | 44 | 115 | 133 |
| ATAATGAAAACGCCGCCATTTCTCA | 191 | 25 | 44 | 119 | 143 |
| GAAAACGCCGCCATUUCT | 87 | 18 | 44 | 121 | 138 |
| CATAATGAAAACGCCGCC | 94 | 18 | 44 | 127 | 144 |
| CTGUTAGCCACTGATTAA | 88 | 18 | 44 | 157 | 174 |
| TGTTCAGCTTCTGTTAGCCACTGA | 195 | 24 | 44 | 161 | 184 |
| UCAGCUUCUGUUAGCCACUG | 37 | 20 | 44 | 162 | 181 |
| UCAGCUUCUGUUAGCCACUG | 37 | 20 | 44 | 162 | 181 |
| AAACTGTTCAGCTTCTGTTAGCCAC | 192 | 25 | 44 | 164 | 188 |
| GUUCAGCUUCUGUUAGCC | 43 | 18 | 44 | 166 | 183 |
| TGAGAAACTGTUCAGCUT | 89 | 18 | 44 | 175 | 192 |
| TTGTGTCTTTCTGAGAAACTGTTCA | 193 | 25 | 44 | 179 | 203 |
| TTTGTGTCTTTCTGAGAAAC | 196 | 20 | 44 | 185 | 204 |
| AUUCUCAGGAAUUUGUGUCUUUC | 38 | 23 | 44 | 193 | 215 |
| UCUCAGGAAUUUGUGUCUUUC | 40 | 21 | 44 | 193 | 213 |
| CAGGAATTUGTGUCUUTC | 90 | 18 | 44 | 193 | 210 |
| UUCUCAGGAAUUUGUGUCUUU | 10 | 21 | 44 | 194 | 214 |
| CCAATTCTCAGGAATTTGTGTCTTT | 194 | 25 | 44 | 194 | 218 |
| TUCCCAATUCTCAGGAAT | 95 | 18 | 44 | 204 | 221 |
| AGCATGTTCCCAATUCTC | 92 | 18 | 44 | 210 | 227 |
| GTAUTTAGCATGUTCCCA | 91 | 18 | 44 | 216 | 233 |
| UUUGUAUUUAGCAUGUUCCC | 8 | 20 | 44 | 217 | 236 |
| UUUGUAUUUAGCAUGUUCCC | 8 | 20 | 44 | 217 | 236 |
| CCAUUUGUAUUUAGCAUGUUCCC | 39 | 23 | 44 | 217 | 239 |
| CCAUTUGTAUTTAGCATG | 96 | 18 | 44 | 222 | 239 |

TABLE F
Nucleobase sequences targeted to Exon 45 of dystrophin
pre-mRNA (SEQ ID NO: 222)

| | SEQ ID | | | Seq ID 222 | Seq ID 222 |
|---|---|---|---|---|---|
| Sequence | NO: | Length | Exon | Start | Stop |
| GCCATCCTGGAGTTCCTGTAAGATA | 199 | 25 | 45 | 91 | 115 |
| CCAATGCCATCCTGGAGTTCCTGTAA | 207 | 26 | 45 | 95 | 120 |
| CCAATGCCATCCTGGAGTTCCTGTA | 200 | 25 | 45 | 96 | 120 |
| GCCCAATGCCATCCTGG | 206 | 17 | 45 | 106 | 122 |
| UUUGCCGCUGCCCAAUGCCAUCCUG | 45 | 25 | 45 | 107 | 131 |
| UUUGCCICUGCCCAAUGCCAUCCUG | 53 | 25 | 45 | 107 | 131 |
| CGCTGCCCAATGCCATCC | 82 | 18 | 45 | 109 | 126 |
| GCCGCTGCCCAATGC | 81 | 15 | 45 | 114 | 128 |
| CAGTTTGCCGCTGCCCAA | 83 | 18 | 45 | 117 | 134 |
| CTGACAACAGTTTGCCGCTGCCCAA | 201 | 25 | 45 | 117 | 141 |
| AUUCAAUGUUCUGACAACAGUUUGC | 48 | 25 | 45 | 127 | 151 |
| TGTTCTGACAACAGTTTG | 84 | 18 | 45 | 128 | 145 |
| CCAGUUGCAUUCAAUGUUCUGACAA | 49 | 25 | 45 | 135 | 159 |
| GUUGCAUUCAAUGUUCUGAC | 11 | 20 | 45 | 137 | 156 |
| CAGUUGCAUUCAAUGUUCUGAC | 50 | 22 | 45 | 137 | 158 |
| AGUUGCAUUCAAUGUUCUGA | 51 | 20 | 45 | 138 | 157 |
| GCTGAATTATTTCTTCCCC | 205 | 19 | 45 | 158 | 176 |
| GAUUGCUGAAUUAUUUCUUCC | 52 | 21 | 45 | 160 | 180 |
| TTTGAGGATTGCTGAATTATTTCTT | 202 | 25 | 45 | 162 | 186 |
| TGTTTTTGAGGATTGCTGAA | 204 | 20 | 45 | 171 | 190 |
| GACAGCTGTTTGCAGACCTCCTGCC | 203 | 25 | 45 | 237 | 261 |

TABLE G
Nucleobase sequences targeted to Exon 46 of dystrophin
pre-mRNA (SEQ ID NO: 223)

| | SEQ ID | | | Seq ID 223 | Seq ID 223 |
|---|---|---|---|---|---|
| Sequence | NO: | Length | Exon | Start | Stop |
| CTGCTTCCTCCAACC | 21 | 15 | 46 | 163 | 177 |
| GTTATCTGCTTCCTCCAACC | 22 | 20 | 46 | 163 | 182 |
| CTGCTTCCTCCAACC | 21 | 15 | 46 | 163 | 177 |
| GTTATCTGCTTCCTCCAACC | 22 | 20 | 46 | 163 | 182 |
| AGCAAUGUUAUCUGCUUCCUCCAAC | 56 | 25 | 46 | 164 | 188 |
| GGAUACUAGCAAUGUUAUCUGCUUC | 59 | 25 | 46 | 171 | 195 |
| CUCUUUUCCAGGUUCAAGUGGGAUACUAGC | 70 | 30 | 46 | 186 | 215 |
| AGGUUCAAGUGGGAUACUA | 15 | 19 | 46 | 188 | 206 |
| UCCAGGUUCAAGUGGGAUAC | 13 | 20 | 46 | 190 | 209 |
| UCUUUUCCAGGUUCAAGUGG | 57 | 20 | 46 | 195 | 214 |
| TTTTCCAGGTTCAAGTGG | 86 | 18 | 46 | 195 | 212 |
| UUCCAGGUUCAAGUG | 14 | 15 | 46 | 196 | 210 |
| TTGCTGCTCTTTTCC | 25 | 15 | 46 | 207 | 221 |
| CAAGCUUUUCUUUUAGUUGCUGCUCUUUUCC | 71 | 31 | 46 | 207 | 237 |
| CTTTTAGTTGCTGCTCTTTTCC | 85 | 22 | 46 | 207 | 228 |
| GCUUUUCUUUUAGUUGCUGCUCUUU | 58 | 25 | 46 | 210 | 234 |
| TTAGTTGCTGCTCTT | 24 | 15 | 46 | 211 | 225 |
| GCUUUUCUUUUAGUUGCUGC | 12 | 20 | 46 | 215 | 234 |
| GCTTTTCTTTTAGTTGCTGC | 23 | 20 | 46 | 215 | 234 |

TABLE H
Nucleobase sequences targeted to Exon 50 of dystrophin
pre-mRNA (SEQ ID NO: 224)

| | SEQ ID | | | Seq ID 224 | Seq ID 224 |
|---|---|---|---|---|---|
| Sequence | NO: | Length | Exon | Start | Stop |
| CAGAGCTCAGATCTTCTAACTTCCT | 177 | 25 | 50 | 101 | 125 |
| CCACUCAGAGCUCAGAUCUUCUAACUUCC | 72 | 29 | 50 | 102 | 130 |
| CCACTCAGAGCTCAGATCTTCTAACTTCC | 181 | 29 | 50 | 102 | 130 |
| CTCAGATCUUCTAACUUC | 97 | 18 | 50 | 103 | 120 |
| CUUCCACUCAGAGCUCAGAUCUUCUAA | 73 | 27 | 50 | 107 | 133 |
| CTTCCACTCAGAGCTCAGATCTTCTAA | 183 | 27 | 50 | 107 | 133 |
| CUCAGAGCUCAGAUCUU | 16 | 17 | 50 | 111 | 127 |
| ACCGCCTUCCACTCAGAG | 98 | 18 | 50 | 121 | 138 |
| TCTTGAAGTAAACGGTUT | 99 | 18 | 50 | 139 | 156 |
| GGCTGCTTUGCCCTCAGC | 100 | 18 | 50 | 157 | 174 |
| GCTAGGTCAGGCTGCTTU | 103 | 18 | 50 | 166 | 183 |
| AGTCCAGGAGCTAGGTCA | 101 | 18 | 50 | 175 | 192 |
| AUAGUGGUCAGUCCAGGAGCU | 60 | 21 | 50 | 181 | 201 |
| GCTCCAATAGTGGTCAGT | 102 | 18 | 50 | 190 | 207 |
| CTTACAGGCTCCAATAGTGGTCAGT | 178 | 25 | 50 | 190 | 214 |
| GGGAUCCAGUAUACUUACAGGCUCC | 74 | 25 | 50 | 203 | 227 |
| GGGATCCAGTATACTTACAGGCTCC | 182 | 25 | 50 | 203 | 227 |
| ATGGGATCCAGTATACTTACAGGCT | 179 | 25 | 50 | 205 | 229 |
| AGAGAATGGGATCCAGTATACTTAC | 180 | 25 | 50 | 210 | 234 |

TABLE I
Nucleobase sequences targeted to Exon 51 of dystrophin
pre-mRNA (SEQ ID NO: 225)

| | SEQ ID | | | Seq ID 225 | Seq ID 225 |
|---|---|---|---|---|---|
| Sequence | NO: | Length | Exon | Start | Stop |
| TAACAGUCUGAGUAGGAG | 111 | 18 | 51 | 101 | 118 |
| TGTGTCACCAGAGUAACAGT | 104 | 20 | 51 | 112 | 131 |
| AGGTTGUGUCACCAGAGTAA | 105 | 20 | 51 | 116 | 135 |
| CCACAGGTTGTGTCACCAG | 26 | 19 | 51 | 121 | 139 |
| AGTAACCACAGGUUGTGTCA | 106 | 20 | 51 | 125 | 144 |
| TTTCCTTAGTAACCACAGGTT | 27 | 21 | 51 | 131 | 151 |
| ATTTCTAGTTTGGAGATGGCAGTTTC | 170 | 26 | 51 | 148 | 173 |
| AGTTTGGAGAUGGCAGTT | 114 | 18 | 51 | 150 | 167 |
| GGCATUUCUAGUUTGGAG | 112 | 18 | 51 | 159 | 176 |
| TGGCATTTCTAGTTTGG | 28 | 17 | 51 | 161 | 177 |
| ACAUCAAGGAAGAUGGCAUUUCUAGUUUGG | 75 | 30 | 51 | 161 | 190 |
| ACATCAAGGAAGATGGCATTTCTAGTTTGG | 173 | 30 | 51 | 161 | 190 |
| TGGCATTTCTAGTTTGG | 28 | 17 | 51 | 161 | 177 |
| UCAAGGAAGAUGGCAUUUCUAGUUU | 61 | 25 | 51 | 163 | 187 |
| CATCAAGGAAGATGGCATTTCTAGTT | 171 | 26 | 51 | 164 | 189 |
| ACAUCAAGGAAGAUGGCAUUUCUAG | 76 | 25 | 51 | 166 | 190 |
| CUCCAACAUCAAGGAAGAUGGCAUUUCUAG | 77 | 30 | 51 | 166 | 195 |
| CTCCAACATCAAGGAAGATGGCATTTCTAG | 174 | 30 | 51 | 166 | 195 |
| ACATCAAGGAAGATGGCATTTCTAG | 176 | 25 | 51 | 166 | 190 |
| UCAAGGAAGAUGGCAUUUCU | 17 | 20 | 51 | 168 | 187 |
| UCAAGGAAGAUGGCAUUUCU | 17 | 20 | 51 | 168 | 187 |
| TCAAGGAAGATGGCATTTCT | 175 | 20 | 51 | 168 | 187 |
| GAGCAGGTACCTCCAACATCAAGGAA | 172 | 26 | 51 | 180 | 205 |
| CCAGAGCAGGTACCTCCAACATC | 29 | 23 | 51 | 186 | 208 |
| CCAGAGCAGGTACCTCCAACATC | 29 | 23 | 51 | 186 | 208 |
| GGTAAGTTCTGTCCAAGCCC | 30 | 20 | 51 | 221 | 240 |
| AGCCAGUCGGUAAGTTCT | 113 | 18 | 51 | 231 | 248 |
| TTGATCAAGCAGAGAAAGCC | 107 | 20 | 51 | 245 | 264 |
| CCUCUGUGAUUUUAUAACUUGAU | 18 | 23 | 51 | 260 | 282 |
| CACCCUCUGUGAUUUTATAA | 108 | 20 | 51 | 266 | 285 |
| TCACCCTCTGTGATTTTAT | 31 | 19 | 51 | 268 | 286 |
| CCCTCTGTGATTTT | 32 | 14 | 51 | 270 | 283 |
| ACCCACCAUCACCCUCTGTG | 109 | 20 | 51 | 275 | 294 |
| TCACCCACCATCACCCT | 33 | 17 | 51 | 280 | 296 |
| CCTCAAGGUCACCCACCATC | 110 | 20 | 51 | 285 | 304 |
| UGAUAUCCUCAAGGUCACCC | 19 | 20 | 51 | 291 | 310 |
| TGATATCCTCAAGGTCACCC | 34 | 20 | 51 | 291 | 310 |
| CTGCTTGATGATCATCTCGTT | 35 | 21 | 51 | 310 | 330 |

TABLE J
Nucleobase sequences targeted to Exon 52 of dystrophin
pre-mRNA (SEQ ID NO: 226)

| | SEQ ID | | | Seq ID 226 | Seq ID 226 |
|---|---|---|---|---|---|
| Sequence | NO: | Length | Exon | Start | Stop |
| UCCAACUGGGGACGCCUCUGUUCCAAAUCC | 78 | 30 | 52 | 112 | 141 |
| ACUGGGGACGCCUCUGUUCCA | 79 | 21 | 52 | 117 | 137 |
| UUCCAACUGGGGACGCCUCUGUUCC | 62 | 25 | 52 | 118 | 142 |
| GGUAAUGAGUUCUUCCAACUGG | 47 | 22 | 52 | 133 | 154 |
| CAGCGGTAATGAGTTCTTCCAACTG | 169 | 25 | 52 | 134 | 158 |
| GCUGGUCUUGUUUUUCAA | 20 | 18 | 52 | 167 | 184 |
| CUCUUGAUUGCUGGUCUUGUUUUUC | 46 | 25 | 52 | 169 | 193 |
| CUCUUGAUUGCUGGUCUUGUUUUUC | 46 | 25 | 52 | 169 | 193 |

TABLE K
Nucleobase sequences targeted to Exon 53 of dystrophin
pre-mRNA (SEQ ID NO: 227)

| | SEQ ID | | | Seq ID 227 | Seq ID 227 |
|---|---|---|---|---|---|
| Sequence | NO: | Length | Exon | Start | Stop |
| ATTCTTTCAACTAGAATAAAAG | 189 | 22 | 53 | 89 | 110 |
| CTGATTCTGAATTCUUTC | 115 | 18 | 53 | 103 | 120 |
| TACTTCATCCCACTGATTCTGAATT | 184 | 25 | 53 | 108 | 132 |
| UUGUACUUCAUCCCACUGAUUCUGA | 136 | 25 | 53 | 111 | 135 |
| UGUUCUUGUACUUCAUCCCACUGAU | 137 | 25 | 53 | 116 | 140 |
| TTCTTGTACTTCATCCCA | 116 | 18 | 53 | 121 | 138 |
| CTGAAGGTGTTCTTGTACTTCATCC | 185 | 25 | 53 | 123 | 147 |
| CTGAAGGTGTTCTTGTACTTCATCC | 185 | 25 | 53 | 123 | 147 |
| GUUCUGAAGGUGUUCUUGUACUUCA | 138 | 25 | 53 | 126 | 150 |
| CCGGUUCUGAAGGUGUUCUUGUACU | 139 | 25 | 53 | 129 | 153 |
| CTGAAGGTGTTCTTGTAC | 123 | 18 | 53 | 130 | 147 |
| UCCGGUUCUGAAGGUGUUCUUGUAC | 140 | 25 | 53 | 130 | 154 |
| CTCCGGTTCTGAAGGTGTTCTTGTA | 127 | 25 | 53 | 131 | 155 |
| CUCCGGUUCUGAAGGUGUUCUUGUA | 141 | 25 | 53 | 131 | 155 |
| CCGGTTCTGAAGGTGTTCTTGT | 128 | 22 | 53 | 132 | 153 |
| CCTCCGGTTCTGAAGGTGTTCTTGT | 129 | 25 | 53 | 132 | 156 |
| UUCUGAAGGUGUUCUUGU | 142 | 18 | 53 | 132 | 149 |
| GGUUCUGAAGGUGUUCUUGU | 143 | 20 | 53 | 132 | 151 |
| CCUCCGGUUCUGAAGGUGUUCUUGU | 144 | 25 | 53 | 132 | 156 |
| UGUUGCCUCCGGUUCUGAAGGUGUUCUUGU | 145 | 30 | 53 | 132 | 161 |
| TCCGGTTCTGAAGGTGTTCTTG | 130 | 22 | 53 | 133 | 154 |
| GCCUCCGGUUCUGAAGGUGUUCUUG | 146 | 25 | 53 | 133 | 157 |
| TGCCTCCGGTTCTGAAGGTGTTCTT | 131 | 25 | 53 | 134 | 158 |
| UGCCUCCGGUUCUGAAGGUGUUCUU | 147 | 25 | 53 | 134 | 158 |
| UUCUGAAGGUGUUCU | 148 | 15 | 53 | 135 | 149 |
| CGGUUCUGAAGGUGUUCU | 149 | 18 | 53 | 135 | 152 |
| UCCGGUUCUGAAGGUGUUCU | 150 | 20 | 53 | 135 | 154 |
| UUGCCUCCGGUUCUGAAGGUGUUCU | 151 | 25 | 53 | 135 | 159 |
| GUUGCCUCCGGUUCUGAAGGUGUUC | 44 | 25 | 53 | 136 | 160 |
| CCGGTTCTGAAGGTGTTC | 132 | 18 | 53 | 136 | 153 |
| CTCCGGTTCTGAAGGTGTTC | 133 | 20 | 53 | 136 | 155 |
| CCTCCGGTTCTGAAGGTGTTC | 134 | 21 | 53 | 136 | 156 |
| GCCTCCGGTTCTGAAGGTGTTC | 135 | 22 | 53 | 136 | 157 |
| GUUGCCUCCGGUUCUGAAGGUGUUC | 44 | 25 | 53 | 136 | 160 |
| CCUCCGGUUCUGAAGGUGUU | 152 | 20 | 53 | 137 | 156 |
| UGUUGCCUCCGGUUCUGAAGGUGUU | 153 | 25 | 53 | 137 | 161 |
| CUCCGGUUCUGAAGGUGU | 154 | 18 | 53 | 138 | 155 |
| CUGUUGCCUCCGGUUCUGAAGGUGU | 155 | 25 | 53 | 138 | 162 |
| CTGTTGCCTCCGGTTCTGAAGGTGT | 186 | 25 | 53 | 138 | 162 |
| CAUUCAACUGUUGCCUCCGGUUCUGAAGGUG | 80 | 31 | 53 | 139 | 169 |
| CCUCCGGTTCTGAAGGTG | 117 | 18 | 53 | 139 | 156 |
| ACUGUUGCCUCCGGUUCUGAAGGUG | 156 | 25 | 53 | 139 | 163 |
| CAUUCAACUGUUGCCUCCGGUUCUGAAGGUG | 80 | 31 | 53 | 139 | 169 |
| CATTCAACTGTTGCCTCCGGTTCTGAAGGTG | 187 | 31 | 53 | 139 | 169 |
| UCCGGUUCUGAAGGU | 157 | 15 | 53 | 140 | 154 |
| UUGCCUCCGGUUCUGAAGGU | 158 | 20 | 53 | 140 | 159 |
| AACUGUUGCCUCCGGUUCUGAAGGU | 159 | 25 | 53 | 140 | 164 |
| UGCCUCCGGUUCUGAAGG | 160 | 18 | 53 | 141 | 158 |
| CAACUGUUGCCUCCGGUUCUGAAGG | 161 | 25 | 53 | 141 | 165 |
| UGUUGCCUCCGGUUCUGAAG | 162 | 20 | 53 | 142 | 161 |
| UGUUGCCUCCGGUUCUGA | 163 | 18 | 53 | 144 | 161 |
| UUGCCUCCGGUUCUG | 164 | 15 | 53 | 145 | 159 |
| CUGUUGCCUCCGGUUCUG | 165 | 18 | 53 | 145 | 162 |
| CTGTTGCCTCCGGTTCTG | 188 | 18 | 53 | 145 | 162 |
| UCAUUCAACUGUUGCCUCCGGUUCU | 166 | 25 | 53 | 146 | 170 |
| CATTUCAUTCAACTGTTG | 118 | 18 | 53 | 157 | 174 |
| TTCCAGCCATTGTGTTGA | 124 | 18 | 53 | 184 | 201 |
| TTCCTTAGCTUCCAGCCA | 119 | 18 | 53 | 193 | 210 |
| GCTTCUTCCUTAGCUTCC | 126 | 18 | 53 | 198 | 215 |
| ACCUGCUCAGCUUCUUCCUUAGCUU | 63 | 25 | 53 | 200 | 224 |
| CTCAGCTUCTTCCTTAGC | 125 | 18 | 53 | 202 | 219 |
| TAAGACCTGCTCAGCUTC | 120 | 18 | 53 | 211 | 228 |
| UUGGCUCUGGCCUGUCCUAAGACCU | 167 | 25 | 53 | 221 | 245 |
| CAAGCUUGGCUCUGGCCUGUCCUAA | 168 | 25 | 53 | 226 | 250 |
| CTTGGCTCTGGCCTGUCC | 121 | 18 | 53 | 229 | 246 |
| CTCCTUCCATGACTCAAG | 122 | 18 | 53 | 247 | 264 |

[0077] In certain embodiments, oligomeric compounds comprise a modified oligonucleotide listed in Tables L-V below. In certain embodiments, oligomeric compounds consist of a modified oligonucleotide listed in Tables L-V below. In certain embodiments, oligomeric compounds comprise a modified oligonucleotide listed in Tables L-V below and a conjugate group. In certain embodiments, oligomeric compounds consist of a modified oligonucleotide listed in Tables L-V below and a conjugate group.

[0078] In Tables L-V below, subscript “s” represents a phosphorothioate internucleoside linkage, each subscript “x” represents either a phosphorothioate internucleoside linkage or a phosphodiester internucleoside linkage, subscript “n” following a nucleobase represents a 2′-O—(N-methylacetamide) modified nucleoside, and superscript “m” before a C represents a 5-methylcytosine.

TABLE L
Modified oligonucleotides complementary to dystrophin pre-mRNA (SEQ ID NO: 228)

| | | | SEQ ID |
|---|---|---|---|
| Sequence | Length | Exon | NO: |
| ^{m}Cₙₛ^{m}Cₙₓ^{m}CₙₓAₙₓUₙₓUₙₓUₙₓUₙₓGₙₓUₙₓGₙₓAₙₓAₙₓUₙₓGₙₓUₙₓUₙₓUₙₓUₙₓ | 24 | 2 | 3 |
| ^{m}CₙₓUₙₓUₙₓUₙₛUₙ | | | |
| ^{m}CₙₛUₙₓUₙₓ^{m}Cₙₓ^{m}CₙₓUₙₓGₙₓGₙₓAₙₓUₙₓGₙₓGₙₓ^{m}CₙₓUₙₓUₙₓ^{m}CₙₓAₙₓAₙₛUₙ | 19 | 8 | 4 |
| GₙₛUₙₓAₙₓ^{m}CₙₓAₙₓUₙₓUₙₓAₙₓAₙₓGₙₓAₙₓUₙₓGₙₓGₙₓAₙₓ^{m}CₙₓUₙₓUₙₛ^{m}Cₙ | 19 | 8 | 5 |
| ^{m}CₙₛUₙₓGₙₓUₙₓAₙₓGₙₓ^{m}CₙₓUₙₓUₙₓ^{m}CₙₓAₙₓ^{m}Cₙₓ^{m}Cₙₓ^{m}CₙₓUₙₓUₙₓUₙₓ^{m}Cₙₛ | 19 | 43 | 6 |
| ^{m}Cₙ | | | |
| ^{m}CₙₛGₙₓ^{m}Cₙₓ^{m}CₙₓGₙₓ^{m}Cₙₓ^{m}CₙₓAₙₓUₙₓUₙₓUₙₓ^{m}CₙₓUₙₓ^{m}CₙₓAₙₓAₙₓ^{m}CₙₓAₙₛ | 19 | 44 | 7 |
| Gₙ | | | |
| UₙₛUₙₓUₙₓGₙₓUₙₓAₙₓUₙₓUₙₓUₙₓAₙₓGₙₓ^{m}CₙₓAₙₓUₙₓGₙₓUₙₓUₙₓ^{m}Cₙₓ^{m}Cₙₛ | 20 | 44 | 8 |
| ^{m}Cₙ | | | |
| ^{m}Cₙₛ^{m}CₙₓGₙₓ^{m}Cₙₓ^{m}CₙₓAₙₓUₙₓUₙₓUₙₓ^{m}CₙₓUₙₓ^{m}CₙₓAₙₓAₙₓ^{m}CₙₓAₙₛGₙ | 17 | 44 | 9 |
| UₙₛUₙₓ^{m}CₙₓUₙₓ^{m}CₙₓAₙₓGₙₓGₙₓAₙₓAₙₓUₙₓUₙₓUₙₓGₙₓUₙₓGₙₓUₙₓ^{m}CₙₓUₙₓUₙₛ | 21 | 44 | 10 |
| Uₙ | | | |
| GₙₛUₙₓUₙₓGₙₓ^{m}CₙₓAₙₓUₙₓUₙₓ^{m}CₙₓAₙₓAₙₓUₙₓGₙₓUₙₓUₙₓ^{m}CₙₓUₙₓGₙₓAₙₛ^{m} | 20 | 45 | 11 |
| Cₙ | | | |
| Gₙₛ^{m}CₙₓUₙₓUₙₓUₙₓUₙₓ^{m}CₙₓUₙₓUₙₓUₙₓUₙₓAₙₓGₙₓUₙₓUₙₓGₙₓ^{m}CₙₓUₙₓGₙₛ^{m} | 20 | 46 | 12 |
| Cₙ | | | |
| Uₙₛ^{m}Cₙₓ^{m}CₙₓAₙₓGₙₓGₙₓUₙₓUₙₓ^{m}CₙₓAₙₓAₙₓGₙₓUₙₓGₙₓGₙₓGₙₓAₙₓUₙₓAₙₛ^{m} | 20 | 46 | 13 |
| Cₙ | | | |
| UₙₛUₙₓ^{m}Cₙₓ^{m}CₙₓAₙₓGₙₓGₙₓUₙₓUₙₓ^{m}CₙₓAₙₓAₙₓGₙₓUₙₛGₙ | 15 | 46 | 14 |
| AₙₛGₙₓGₙₓUₙₓUₙₓ^{m}CₙₓAₙₓAₙₓGₙₓUₙₓGₙₓGₙₓGₙₓAₙₓUₙₓAₙₓ^{m}CₙₓUₙₛAₙ | 19 | 46 | 15 |
| ^{m}CₙₛUₙₓ^{m}CₙₓAₙₓGₙₓAₙₓGₙₓ^{m}CₙₓUₙₓ^{m}CₙₓAₙₓGₙₓAₙₓUₙₓ^{m}CₙₓUₙₛUₙ | 17 | 50 | 16 |
| Uₙₛ^{m}CₙₓAₙₓAₙₓGₙₓGₙₓAₙₓAₙₓGₙₓAₙₓUₙₓGₙₓGₙₓ^{m}CₙₓAₙₓUₙₓUₙₓUₙₓ^{m}CₙₛUₙ | 20 | 51 | 17 |
| ^{m}Cₙₛ^{m}CₙₓUₙₓ^{m}CₙₓUₙₓGₙₓUₙₓGₙₓAₙₓUₙₓUₙₓUₙₓUₙₓAₙₓUₙₓAₙₓAₙₓ^{m}CₙₓUₙₓ | 23 | 51 | 18 |
| UₙₓGₙₓAₙₛUₙ | | | |
| UₙₛGₙₓAₙₓUₙₓAₙₓUₙₓ^{m}Cₙₓ^{m}CₙₓUₙₓ^{m}CₙₓAₙₓAₙₓGₙₓGₙₓUₙₓ^{m}CₙₓAₙₓ^{m}Cₙₓ^{m}Cₙₛ^{m} | 20 | 51 | 19 |
| Cₙ | | | |
| Gₙₛ^{m}CₙₓUₙₓGₙₓGₙₓUₙₓ^{m}CₙₓUₙₓUₙₓGₙₓUₙₓUₙₓUₙₓUₙₓUₙₓ^{m}CₙₓAₙₛAₙ | 18 | 52 | 20 |
| ^{m}CₙₛTₙₓGₙₓ^{m}CₙₓTₙₓTₙₓ^{m}Cₙₓ^{m}CₙₓTₙₓ^{m}Cₙₓ^{m}CₙₓAₙₓAₙₓ^{m}Cₙₛ^{m}Cₙ | 15 | 46 | 21 |
| GₙₛTₙₓTₙₓAₙₓTₙₓ^{m}CₙₓTₙₓGₙₓ^{m}CₙₓTₙₓTₙₓ^{m}Cₙₓ^{m}CₙₓTₙₓ^{m}Cₙₓ^{m}CₙₓAₙₓAₙₓ^{m}Cₙₛ^{m} | 20 | 46 | 22 |
| Cₙ | | | |
| Gₙₛ^{m}CₙₓTₙₓTₙₓTₙₓTₙₓ^{m}CₙₓTₙₓTₙₓTₙₓTₙₓAₙₓGₙₓTₙₓTₙₓGₙₓ^{m}CₙₓTₙₓGₙₛ^{m}Cₙ | 20 | 46 | 23 |
| TₙₛTₙₓAₙₓGₙₓTₙₓTₙₓGₙₓ^{m}CₙₓTₙₓGₙₓ^{m}CₙₓTₙₓ^{m}CₙₓTₙₛTₙ | 15 | 46 | 24 |
| TₙₛTₙₓGₙₓ^{m}CₙₓTₙₓGₙₓ^{m}CₙₓTₙₓ^{m}CₙₓTₙₓTₙₓTₙₓTₙₓ^{m}Cₙₛ^{m}Cₙ | 15 | 46 | 25 |
| ^{m}Cₙₛ^{m}CₙₓAₙₓ^{m}CₙₓAₙₓGₙₓGₙₓTₙₓTₙₓGₙₓTₙₓGₙₓTₙₓ^{m}CₙₓAₙₓ^{m}Cₙₓ^{m}AₙₛGₙ | 19 | 51 | 26 |
| TₙₛTₙₓTₙₓ^{m}Cₙₓ^{m}CₙₓTₙₓTₙₓAₙₓGₙₓTₙₓAₙₓAₙₓ^{m}Cₙₓ^{m}CₙₓAₙₓ^{m}CₙₓAₙₓGₙₓGₙₓ | 21 | 51 | 27 |
| TₙₛTₙ | | | |
| TₙₛGₙₓGₙₓ^{m}CₙₓAₙₓTₙₓTₙₓTₙₓ^{m}CₙₓTₙₓAₙₓGₙₓTₙₓTₙₓTₙₓGₙₛGₙ | 17 | 51 | 28 |
| ^{m}Cₙₛ^{m}CₙₓAₙₓGₙₓAₙₓGₙₓ^{m}CₙₓAₙₓGₙₓGₙₓTₙₓAₙₓ^{m}Cₙₓ^{m}CₙₓTₙₓ^{m}Cₙₓ^{m}CₙₓAₙₓ | 23 | 51 | 29 |
| Aₙₓ^{m}CₙₓAₙₓTₙₛ^{m}Cₙ | | | |
| GₙₛGₙₓTₙₓAₙₓAₙₓGₙₓTₙₓTₙₓ^{m}CₙₓTₙₓGₙₓTₙₓ^{m}Cₙₓ^{m}CₙₓAₙₓAₙₓGₙₓ^{m}Cₙₓ^{m}Cₙₛ^{m} | 20 | 51 | 30 |
| Cₙ | | | |
| Tₙₛ^{m}CₙₓAₙₓ^{m}Cₙₓ^{m}Cₙₓ^{m}CₙₓTₙₓ^{m}CₙₓTₙₓGₙₓTₙₓGₙₓAₙₓTₙₓTₙₓTₙₓTₙₓAₙₛTₙ | 19 | 51 | 31 |
| ^{m}Cₙₛ^{m}Cₙₓ^{m}CₙₓTₙₓ^{m}CₙₓTₙₓGₙₓTₙₓGₙₓAₙₓTₙₓTₙₓTₙₛTₙ | 14 | 51 | 32 |
| Tₙₛ^{m}CₙₓAₙₓ^{m}Cₙₓ^{m}Cₙₓ^{m}CₙₓAₙₓ^{m}Cₙₓ^{m}CₙₓAₙₓTₙₓ^{m}CₙₓAₙₓ^{m}Cₙₓ^{m}Cₙₓ^{m}CₙₛTₙ | 17 | 51 | 33 |
| TₙₛGₙₓAₙₓTₙₓAₙₓTₙₓ^{m}Cₙₓ^{m}CₙₓTₙₓ^{m}CₙₓAₙₓAₙₓGₙₓGₙₓTₙₓ^{m}CₙₓAₙₓ^{m}Cₙₓ^{m}Cₙₛ^{m} | 20 | 51 | 34 |
| Cₙ | | | |
| ^{m}CₙₛTₙₓGₙₓ^{m}CₙₓTₙₓTₙₓGₙₓAₙₓTₙₓGₙₓAₙₓTₙₓ^{m}CₙₓAₙₓTₙₓ^{m}CₙₓTₙₓ^{m}CₙₓGₙₓTₙₛ | 21 | 51 | 35 |
| Tₙ | | | |
| Gₙₛ^{m}Cₙₓ^{m}CₙₓAₙₓUₙₓUₙₓUₙₓ^{m}CₙₓUₙₓ^{m}CₙₓAₙₓAₙₓ^{m}CₙₓAₙₓGₙₓAₙₓUₙₓ^{m}CₙₛUₙ | 19 | 44 | 36 |
| Uₙₛ^{m}CₙₓAₙₓGₙₓ^{m}CₙₓUₙₓUₙₓ^{m}CₙₓUₙₓGₙₓUₙₓUₙₓAₙₓGₙₓ^{m}Cₙₓ^{m}CₙₓAₙₓ^{m}CₙₓUₙₛ | 20 | 44 | 37 |
| Gₙ | | | |
| UₙₛUₙₓUₙₓGₙₓUₙₓAₙₓUₙₓUₙₓUₙₓAₙₓGₙₓ^{m}CₙₓAₙₓUₙₓGₙₓUₙₓUₙₓ^{m}Cₙₓ^{m}Cₙₛ^{m} | 20 | 44 | 8 |
| Cₙ | | | |
| AₙₛUₙₓUₙₓ^{m}CₙₓUₙₓ^{m}CₙₓAₙₓGₙₓGₙₓAₙₓAₙₓUₙₓUₙₓUₙₓGₙₓUₙₓGₙₓUₙₓ^{m}CₙₓUₙₓ | 23 | 44 | 38 |
| UₙₓUₙₛ^{m}Cₙ | | | |
| ^{m}Cₙₛ^{m}CₙₓAₙₓUₙₓUₙₓUₙₓGₙₓUₙₓAₙₓUₙₓUₙₓUₙₓAₙₓGₙₓ^{m}CₙₓAₙₓUₙₓGₙₓUₙₓUₙₓ^{m} | 23 | 44 | 39 |
| Cₙₓ^{m}Cₙₛ^{m}Cₙ | | | |
| Uₙₛ^{m}CₙₓUₙₓ^{m}CₙₓAₙₓGₙₓGₙₓAₙₓAₙₓUₙₓUₙₓUₙₓGₙₓUₙₓGₙₓUₙₓ^{m}CₙₓUₙₓUₙₓUₙₛ^{m} | 21 | 44 | 40 |
| Cₙ | | | |
| Gₙₛ^{m}Cₙₓ^{m}CₙₓAₙₓUₙₓUₙₓUₙₓ^{m}CₙₓUₙₓ^{m}CₙₓAₙₓAₙₓ^{m}CₙₓAₙₓGₙₓAₙₓUₙₓ^{m}CₙₓUₙₓ | 23 | 44 | 41 |
| GₙₓUₙₓ^{m}CₙₛAₙ | | | |
| Gₙₛ^{m}Cₙₓ^{m}CₙₓGₙₓ^{m}Cₙₓ^{m}CₙₓAₙₓUₙₓUₙₓUₙₓ^{m}Cₙₓ^{m}CₙₓAₙₓAₙₓ^{m}CₙₓAₙₛGₙ | 18 | 44 | 42 |
| GₙₛUₙₓUₙₓ^{m}CₙₓAₙₓGₙₓ^{m}CₙₓUₙₓUₙₓ^{m}CₙₓUₙₓGₙₓUₙₓUₙₓAₙₓGₙₓ^{m}Cₙₛ^{m}Cₙ | 18 | 44 | 43 |
| GₙₛUₙₓUₙₓGₙₓ^{m}Cₙₓ^{m}CₙₓUₙₓ^{m}Cₙₓ^{m}CₙₓGₙₓGₙₓUₙₓUₙₓ^{m}CₙₓUₙₓGₙₓAₙₓAₙₓGₙₓ | 25 | 53 | 44 |
| GₙₓUₙₓGₙₓUₙₓUₙₛ^{m}Cₙ | | | |
| UₙₛUₙₓUₙₓGₙₓ^{m}Cₙₓ^{m}CₙₓGₙₓ^{m}CₙₓUₙₓGₙₓ^{m}Cₙₓ^{m}Cₙₓ^{m}CₙₓAₙₓAₙₓUₙₓGₙₓ^{m}Cₙₓ^{m} | 25 | 45 | 45 |
| CₙₓAₙₓUₙₓ^{m}Cₙₓ^{m}C^{nx}UₙₛGₙ | | | |
| ^{m}CₙₛUₙₓ^{m}CₙₓUₙₓUₙₓGₙₓAₙₓUₙₓUₙₓGₙₓ^{m}CₙₓUₙₓGₙₓGₙₓUₙₓ^{m}CₙₓUₙₓUₙₓGₙₓ | 25 | 52 | 46 |
| UₙₓUₙₓUₙₓUₙₓUₙₛ^{m}Cₙ | | | |
| Uₙₛ^{m}CₙₓAₙₓAₙₓGₙₓGₙₓAₙₓAₙₓGₙₓAₙₓUₙₓGₙₓGₙₓ^{m}CₙₓAₙₓUₙₓUₙₓUₙₓ^{m}CₙₛUₙ | 20 | 51 | 17 |
| Uₙₛ^{m}CₙₓAₙₓGₙₓ^{m}CₙₓUₙₓUₙₓ^{m}CₙₓUₙₓGₙₓUₙₓUₙₓAₙₓGₙₓ^{m}Cₙₓ^{m}CₙₓAₙₓ^{m}CₙₓUₙₛ | 20 | 44 | 37 |
| Gₙ | | | |
| GₙₛGₙₓUₙₓAₙₓAₙₓUₙₓGₙₓAₙₓGₙₓUₙₓUₙₓ^{m}CₙₓUₙₓUₙₓ^{m}Cₙₓ^{m}CₙₓAₙₓAₙₓ^{m}Cₙₓ | 22 | 44 | 47 |
| UₙₓGₙₛGₙ | | | |
| UₙₛUₙₓUₙₓGₙₓ^{m}Cₙₓ^{m}CₙₓGₙₓ^{m}CₙₓUₙₓGₙₓ^{m}Cₙₓ^{m}Cₙₓ^{m}CₙₓAₙₓAₙₓUₙₓGₙₓ^{m}Cₙₓ^{m} | 25 | 45 | 45 |
| CₙₓAₙₓUₙₓ^{m}Cₙₓ^{m}CₙₓUₙₛGₙ | | | |
| AₙₛUₙₓUₙₓ^{m}CₙₓAₙₓAₙₓUₙₓGₙₓUₙₓUₙₓ^{m}CₙₓUₙₓGₙₓAₙₓ^{m}CₙₓAₙₓAₙₓ^{m}CₙₓAₙₓ | 25 | 45 | 48 |
| GₙₓUₙₓUₙₓUₙₓGₙₛ^{m}Cₙ | | | |
| ^{m}Cₙₛ^{m}CₙₓAₙₓGₙₓUₙₓUₙₓGₙₓ^{m}CₙₓAₙₓUₙₓUₙₓ^{m}CₙₓAₙₓAₙₓUₙₓGₙₓUₙₓUₙₓ^{m}Cₙₓ | 25 | 45 | 49 |
| UₙₓGₙₓAₙₓ^{m}CₙₓAₙₛAₙ | | | |
| ^{m}CₙₛAₙₓGₙₓUₙₓUₙₓGₙₓ^{m}CₙₓAₙₓUₙₓUₙₓ^{m}CₙₓAₙₓAₙₓUₙₓGₙₓUₙₓUₙₓ^{m}CₙₓUₙₓ | 22 | 45 | 50 |
| GₙₓAₙₛ^{m}Cₙ | | | |
| AₙₛGₙₓUₙₓUₙₓGₙₓ^{m}CₙₓAₙₓUₙₓUₙₓ^{m}CₙₓAₙₓAₙₓUₙₓGₙₓUₙₓUₙₓ^{m}CₙₓUₙₓGₙₛAₙ | 20 | 45 | 51 |
| GₙₛAₙₓUₙₓUₙₓGₙₓ^{m}CₙₓUₙₓGₙₓAₙₓAₙₓUₙₓUₙₓAₙₓUₙₓUₙₓUₙₓ^{m}CₙₓUₙₓUₙₓ^{m}Cₙₛ^{m} | 21 | 45 | 52 |
| Cₙ | | | |
| UₙₛUₙₓUₙₓGₙₓ^{m}Cₙₓ^{m}CₙₓI^{m}CₙₓUₙₓGₙₓ^{m}Cₙₓ^{m}Cₙₓ^{m}CₙₓAₙₓAₙₓUₙₓGₙₓ^{m}Cₙₓ^{m}Cₙₓ | 25 | 45 | 53 |
| AₙₓUₙₓ^{m}Cₙₓ^{m}CₙₓUₙₛGₙ | | | |
| ^{m}CₙₛGₙₓAₙₓ^{m}Cₙₓ^{m}CₙₓUₙₓGₙₓAₙₓGₙₓ^{m}CₙₓUₙₓUₙₓUₙₓGₙₓUₙₓUₙₓGₙₓUₙₓAₙₛ | 20 | 43 | 54 |
| Gₙ | | | |
| ^{m}CₙₛGₙₓUₙₓUₙₓGₙₓ^{m}CₙₓAₙₓ^{m}CₙₓUₙₓUₙₓUₙₓGₙₓ^{m}CₙₓAₙₓAₙₓUₙₓGₙₓ^{m}CₙₓUₙₓ | 23 | 43 | 55 |
| Gₙₓ^{m}CₙₓUₙₛGₙ | | | |
| AₙₛGₙₓ^{m}CₙₓAₙₓAₙₓUₙₓGₙₓUₙₓUₙₓAₙₓUₙₓ^{m}CₙₓUₙₓGₙₓ^{m}CₙₓUₙₓUₙₓ^{m}Cₙₓ^{m}Cₙₓ | 25 | 46 | 56 |
| Uₙₓ^{m}Cₙₓ^{m}CₙₓAₙₓAₙₛ^{m}Cₙ | | | |
| Uₙₛ^{m}CₙₓUₙₓUₙₓUₙₓUₙₓ^{m}Cₙₓ^{m}CₙₓAₙₓGₙₓGₙₓUₙₓUₙₓ^{m}CₙₓAₙₓAₙₓGₙₓUₙₓGₙₛ | 20 | 46 | 57 |
| Gₙ | | | |
| Gₙₛ^{m}CₙₓUₙₓUₙₓUₙₓUₙₓ^{m}CₙₓUₙₓUₙₓUₙₓUₙₓAₙₓGₙₓUₙₓUₙₓGₙₓ^{m}CₙₓUₙₓGₙₓ^{m} | 25 | 46 | 58 |
| CₙₓUₙₓ^{m}CₙₓUₙₓUₙₛUₙ | | | |
| GₙₛGₙₓAₙₓUₙₓAₙₓ^{m}CₙₓUₙₓAₙₓGₙₓ^{m}CₙₓAₙₓAₙₓUₙₓGₙₓUₙₓUₙₓAₙₓUₙₓ^{m}CₙₓUₙₓ | 25 | 46 | 59 |
| Gₙₓ^{m}CₙₓUₙₓUₙₛ^{m}Cₙ | | | |
| AₙₛUₙₓAₙₓGₙₓUₙₓGₙₓGₙₓUₙₓ^{m}CₙₓAₙₓGₙₓUₙₓ^{m}Cₙₓ^{m}CₙₓAₙₓGₙₓGₙₓAₙₓGₙₓ^{m}Cₙₛ | 21 | 50 | 60 |
| Uₙ | | | |
| Uₙₛ^{m}CₙₓAₙₓAₙₓGₙₓGₙₓAₙₓAₙₓGₙₓAₙₓUₙₓGₙₓGₙₓ^{m}CₙₓAₙₓUₙₓUₙₓUₙₓ^{m}CₙₓUₙₓ | 25 | 51 | 61 |
| AₙₓGₙₓUₙₓUₙₛUₙ | | | |
| UₙₛUₙₓ^{m}Cₙₓ^{m}CₙₓAₙₓAₙₓ^{m}CₙₓUₙₓGₙₓGₙₓGₙₓGₙₓAₙₓ^{m}CₙₓGₙₓ^{m}Cₙₓ^{m}CₙₓUₙₓ^{m}Cₙₓ | 25 | 52 | 62 |
| UₙₓGₙₓUₙₓUₙₓ^{m}Cₙₛ^{m}Cₙ | | | |
| ^{m}CₙₛUₙₓ^{m}CₙₓUₙₓUₙₓGₙₓAₙₓUₙₓUₙₓGₙₓ^{m}CₙₓUₙₓGₙₓGₙₓUₙₓ^{m}CₙₓUₙₓUₙₓGₙₓ | 25 | 52 | 46 |
| UₙₓUₙₓUₙₓUₙₓUₙₛ^{m}Cₙ | | | |
| Aₙₛ^{m}Cₙₓ^{m}CₙₓUₙₓGₙₓ^{m}CₙₓUₙₓ^{m}CₙₓAₙₓGₙₓ^{m}CₙₓUₙₓUₙₓ^{m}CₙₓUₙₓUₙₓ^{m}Cₙₓ^{m}Cₙₓ | 25 | 53 | 63 |
| UₙₓUₙₓAₙₓGₙₓ^{m}CₙₓUₙₛUₙ | | | |
| GₙₛAₙₓUₙₓAₙₓGₙₓGₙₓUₙₓGₙₓGₙₓUₙₓAₙₓUₙₓ^{m}CₙₓAₙₓAₙₓ^{m}CₙₓAₙₓUₙₓ^{m}CₙₓUₙₓ | 24 | 8 | 64 |
| GₙₓUₙₓAₙₛAₙ | | | |
| GₙₛAₙₓUₙₓAₙₓGₙₓGₙₓUₙₓGₙₓGₙₓUₙₓAₙₓUₙₓ^{m}CₙₓAₙₓAₙₓ^{m}CₙₓAₙₓUₙₓ^{m}CₙₓUₙₛ | 21 | 8 | 65 |
| Gₙ | | | |
| GₙₛAₙₓUₙₓAₙₓGₙₓGₙₓUₙₓGₙₓGₙₓUₙₓAₙₓUₙₓ^{m}CₙₓAₙₓAₙₓ^{m}CₙₓAₙₓUₙₓ^{m}CₙₓUₙₓ | 25 | 8 | 66 |
| GₙₓUₙₓAₙₓAₙₛGₙ | | | |
| UₙₛAₙₓUₙₓGₙₓUₙₓGₙₓUₙₓUₙₓAₙₓ^{m}Cₙₓ^{m}CₙₓUₙₓAₙₓ^{m}Cₙₓ^{m}Cₙₓ^{m}CₙₓUₙₓUₙₓGₙₓ | 25 | 43 | 67 |
| Uₙₓ^{m}CₙₓGₙₓGₙₓUₙₛ^{m}Cₙ | | | |
| GₙₛGₙₓAₙₓGₙₓAₙₓGₙₓAₙₓGₙₓ^{m}CₙₓUₙₓUₙₓ^{m}Cₙₓ^{m}CₙₓUₙₓGₙₓUₙₓAₙₓGₙₓ^{m}Cₙₛ | 20 | 43 | 68 |
| Uₙ | | | |
| Uₙₛ^{m}CₙₓAₙₓ^{m}Cₙₓ^{m}Cₙₓ^{m}CₙₓUₙₓUₙₓUₙₓ^{m}Cₙₓ^{m}CₙₓAₙₓ^{m}CₙₓAₙₓGₙₓGₙₓ^{m}CₙₓGₙₓ | 23 | 43 | 69 |
| UₙₓUₙₓGₙₓ^{m}CₙₛAₙ | | | |
| ^{m}CₙₛUₙₓ^{m}CₙₓUₙₓUₙₓUₙₓUₙₓ^{m}CₙₓAₙₓGₙₓGₙₓUₙₓUₙₓ^{m}CₙₓAₙₓAₙₓGₙₓUₙₓ | 30 | 46 | 70 |
| GₙₓGₙₓGₙₓAₙₓUₙₓAₙₓ^{m}CₙₓUₙₓAₙₓGₙₛ^{m}Cₙ | | | |
| ^{m}CₙₛAₙₓAₙₓGₙₓ^{m}CₙₓUₙₓUₙₓUₙₓUₙₓ^{m}CₙₓUₙₓUₙₓUₙₓUₙₓAₙₓGₙₓUₙₓUₙₓGₙₓ^{m}Cₙₓ | 31 | 46 | 71 |
| UₙₓGₙₓ^{m}CₙₓUₙₓ^{m}CₙₓUₙₓUₙₓUₙₓUₙₓ^{m}Cₙₛ^{m}Cₙ | | | |
| ^{m}Cₙₛ^{m}CₙₓAₙₓ^{m}CₙₓUₙₓ^{m}CₙₓAₙₓGₙₓAₙₓGₙₓ^{m}CₙₓUₙₓ^{m}CₙₓAₙₓGₙₓAₙₓUₙₓ^{m}Cₙₓ | 29 | 50 | 72 |
| UₙₓUₙₓ^{m}CₙₓUₙₓAₙₓAₙₓ^{m}CₙₓUₙₓUₙₓ^{m}Cₙₛ^{m}Cₙ | | | |
| ^{m}CₙₛUₙₓUₙₓ^{m}Cₙₓ^{m}CₙₓAₙₓ^{m}CₙₓUₙₓ^{m}CₙₓAₙₓGₙₓAₙₓGₙₓ^{m}CₙₓUₙₓ^{m}CₙₓAₙₓGₙₓ | 27 | 50 | 73 |
| AₙₓUₙₓ^{m}CₙₓUₙₓUₙₓ^{m}CₙₓUₙₓAₙₛAₙ | | | |
| GₙₛGₙₓGₙₓAₙₓUₙₓ^{m}Cₙₓ^{m}CₙₓAₙₓGₙₓUₙₓAₙₓUₙₓAₙₓ^{m}CₙₓUₙₓUₙₓAₙₓ^{m}CₙₓAₙₓ | 25 | 50 | 74 |
| GₙₓGₙₓ^{m}CₙₓUₙₓ^{m}Cₙₛ^{m}Cₙ | | | |
| Aₙₛ^{m}CₙₓAₙₓUₙₓ^{m}CₙₓAₙₓAₙₓGₙₓGₙₓAₙₓAₙₓGₙₓAₙₓUₙₓGₙₓGₙₓ^{m}CₙₓAₙₓUₙₓUₙₓ | 30 | 51 | 75 |
| Uₙₓ^{m}CₙₓUₙₓAₙₓGₙₓUₙₓUₙₓUₙₓGₙₛGₙ | | | |
| Aₙₛ^{m}CₙₓAₙₓUₙₓ^{m}CₙₓAₙₓAₙₓGₙₓGₙₓAₙₓAₙₓGₙₓAₙₓUₙₓGₙₓGₙₓ^{m}CₙₓAₙₓUₙₓUₙₓ | 25 | 51 | 76 |
| Uₙₓ^{m}CₙₓUₙₓAₙₛGₙ | | | |
| ^{m}CₙₛUₙₓ^{m}Cₙₓ^{m}CₙₓAₙₓAₙₓ^{m}CₙₓAₙₓUₙₓ^{m}CₙₓAₙₓAₙₓGₙₓGₙₓAₙₓAₙₓGₙₓAₙₓUₙₓ | 30 | 51 | 77 |
| GₙₓGₙₓ^{m}CₙₓAₙₓUₙₓUₙₓUₙₓ^{m}CₙₓUₙₓAₙₛGₙ | | | |
| Uₙₛ^{m}Cₙₓ^{m}CₙₓAₙₓAₙₓ^{m}CₙₓUₙₓGₙₓGₙₓGₙₓGₙₓAₙₓ^{m}CₙₓGₙₓ^{m}Cₙₓ^{m}CₙₓUₙₓ^{m}Cₙₓ | 30 | 52 | 78 |
| UₙₓGₙₓUₙₓUₙₓ^{m}Cₙₓ^{m}CₙₓAₙₓAₙₓAₙₓUₙₓ^{m}Cₙₛ^{m}Cₙ | | | |
| Aₙₛ^{m}CₙₓUₙₓGₙₓGₙₓGₙₓGₙₓAₙₓ^{m}CₙₓGₙₓ^{m}Cₙₓ^{m}CₙₓUₙₓ^{m}CₙₓUₙₓGₙₓUₙₓUₙₓ^{m}Cₙₓ | 21 | 52 | 79 |
| ^{m}CₙₛAₙ | | | |
| m^{C}ₙₛAₙₓUₙₓUₙₓ^{m}CₙₓAₙₓAₙₓ^{m}CₙₓUₙₓGₙₓUₙₓUₙₓGₙₓ^{m}Cₙₓ^{m}CₙₓUₙₓ^{m}Cₙₓ^{m}Cₙₓ | 31 | 53 | 80 |
| GₙₓGₙₓUₙₓUₙₓ^{m}CₙₓUₙₓGₙₓAₙₓAₙₓGₙₓGₙₓUₙₛGₙ | | | |
| Gₙₛ^{m}Cₙₓ^{m}CₙₓGₙₓ^{m}CₙₓTₙₓGₙₓ^{m}Cₙₓ^{m}Cₙₓ^{m}CₙₓAₙₓAₙₓTₙₓGₙₛ^{m}Cₙ | 15 | 45 | 81 |
| ^{m}CₙₛGₙₓ^{m}CₙₓTₙₓGₙₓ^{m}Cₙₓ^{m}Cₙₓ^{m}CₙₓAₙₓAₙₓTₙₓGₙₓ^{m}Cₙₓ^{m}CₙₓAₙₓTₙₓ^{m}Cₙₛ^{m}Cₙ | 18 | 45 | 82 |
| ^{m}CₙₛAₙₓGₙₓTₙₓTₙₓTₙₓGₙₓ^{m}Cₙₓ^{m}Cₙₓ^{m}CₙₓTₙₓGₙₓ^{m}Cₙₓ^{m}Cₙₓ^{m}CₙₓAₙₛAₙ | 18 | 45 | 83 |
| TₙₛGₙₓTₙₓTₙₓ^{m}CₙₓTₙₓGₙₓAₙₓ^{m}CₙₓAₙₓAₙₓ^{m}CₙₓAₙₓGₙₓTₙₓTₙₓTₙₛGₙ | 18 | 45 | 84 |
| ^{m}CₙₛTₙₓTₙₓTₙₓTₙₓAₙₓGₙₓTₙₓTₙₓGₙₓ^{m}CₙₓTₙₓGₙₓ^{m}CₙₓTₙₓ^{m}CₙₓTₙₓTₙₓTₙₓTₙₓ | 22 | 46 | 85 |
| ^{m}Cₙₛ^{m}Cₙ | | | |
| TₙₛTₙₓTₙₓTₙₓ^{m}Cₙₓ^{m}CₙₓAₙₓGₙₓGₙₓTₙₓTₙₓ^{m}CₙₓAₙₓAₙₓGₙₓTₙₓGₙₛGₙ | 18 | 46 | 86 |
| ^{m}CₙₛTₙₓGₙₓ^{m}CₙₓTₙₓTₙₓ^{m}Cₙₓ^{m}CₙₓTₙₓ^{m}Cₙₓ^{m}CₙₓAₙₓAₙₓ^{m}Cₙₛ^{m}Cₙ | 15 | 46 | 21 |
| GₙₛTₙₓTₙₓAₙₓTₙₓ^{m}CₙₓTₙₓGₙₓ^{m}CₙₓTₙₓTₙₓ^{m}Cₙₓ^{m}CₙₓTₙₓ^{m}Cₙₓ^{m}CₙₓAₙₓAₙₓ^{m}Cₙₛ | 20 | 46 | 22 |
| ^{m}Cₙ | | | |
| GₙₛAₙₓAₙₓAₙₓAₙₓ^{m}CₙₓGₙₓ^{m}Cₙₓ^{m}CₙₓGₙₓ^{m}Cₙₓ^{m}CₙₓAₙₓTₙₓUₙₓUₙₓ^{m}CₙₛTₙ | 18 | 44 | 87 |
| ^{m}CₙₛTₙₓGₙₓUₙₓTₙₓAₙₓGₙₓ^{m}Cₙₓ^{m}CₙₓAₙₓ^{m}CₙₓTₙₓGₙₓAₙₓTₙₓTₙₓAₙₛAₙ | 18 | 44 | 88 |
| TₙₛGₙₓAₙₓGₙₓAₙₓAₙₓAₙₓ^{m}CₙₓTₙₓGₙₓTₙₓUₙₓ^{m}CₙₓAₙₓGₙₓ^{m}CₙₓUₙₛTₙ | 18 | 44 | 89 |
| ^{m}CₙₛAₙₓGₙₓGₙₓAₙₓAₙₓTₙₓTₙₓUₙₓGₙₓTₙₓGₙₓUₙₓ^{m}CₙₓUₙₓUₙₓTₙₛ^{m}Cₙ | 18 | 44 | 90 |
| GₙₛTₙₓAₙₓUₙₓTₙₓTₙₓAₙₓGₙₓ^{m}CₙₓAₙₓTₙₓGₙₓUₙₓTₙₓ^{m}Cₙₓ^{m}Cₙₓ^{m}CₙₛAₙ | 18 | 44 | 91 |
| AₙₛGₙₓ^{m}CₙₓAₙₓTₙₓGₙₓTₙₓTₙₓ^{m}Cₙₓ^{m}Cₙₓ^{m}CₙₓAₙₓAₙₓTₙₓUₙₓ^{m}CₙₓTₙₛ^{m}Cₙ | 18 | 44 | 92 |
| Gₙₛ^{m}Cₙₓ^{m}CₙₓGₙₓ^{m}Cₙₓ^{m}CₙₓAₙₓTₙₓUₙₓUₙₓ^{m}CₙₓUₙₓ^{m}CₙₓAₙₓAₙₓ^{m}CₙₓAₙₛGₙ | 18 | 44 | 93 |
| ^{m}CₙₛAₙₓTₙₓAₙₓAₙₓTₙₓGₙₓAₙₓAₙₓAₙₓAₙₓ^{m}CₙₓGₙₓ^{m}Cₙₓ^{m}CₙₓGₙₓ^{m}Cₙₛ^{m}Cₙ | 18 | 44 | 94 |
| TₙₛUₙₓ^{m}Cₙₓ^{m}Cₙₓ^{m}CₙₓAₙₓAₙₓTₙₓUₙₓ^{m}CₙₓTₙₓ^{m}CₙₓAₙₓGₙₓGₙₓAₙₓAₙₛTₙ | 18 | 44 | 95 |
| ^{m}Cₙₛ^{m}CₙₓAₙₓUₙₓTₙₓUₙₓGₙₓTₙₓAₙₓUₙₓTₙₓTₙₓAₙₓGₙₓ^{m}CₙₓAₙₓTₙₛGₙ | 18 | 44 | 96 |
| ^{m}CₙₛTₙₓ^{m}CₙₓAₙₓGₙₓAₙₓTₙₓ^{m}CₙₓUₓUₙₓ^{m}CₙₓTₙₓAₙₓAₙₓ^{m}CₙₓUₙₓUₙₛ^{m}Cₙ | 18 | 50 | 97 |
| Aₙₛ^{m}Cₙₓ^{m}CₙₓGₙₓ^{m}Cₙₓ^{m}CₙₓTₙₓUₙₓ^{m}Cₙₓ^{m}CₙₓAₙₓ^{m}CₙₓTₙₓ^{m}CₙₓAₙₓGₙₓAₙₛGₙ | 18 | 50 | 98 |
| Tₙₛ^{m}CₙₓTₙₓTₙₓGₙₓAₙₓAₙₓGₙₓTₙₓAₙₓAₙₓAₙₓ^{m}CₙₓGₙₓGₙₓTₙₓUₙₛTₙ | 18 | 50 | 99 |
| GₙₛGₙₓ^{m}CₙₓTₙₓGₙₓ^{m}CₙₓTₙₓUₙₓGₙₓ^{m}Cₙₓ^{m}Cₙₓ^{m}CₙₓTₙₓ^{m}CₙₓAₙₓGₙₛ^{m}Cₙ | 18 | 50 | 100 |
| AₙₛGₙₓTₙₓ^{m}Cₙₓ^{m}CₙₓAₙₓGₙₓGₙₓAₙₓGₙₓ^{m}CₙₓTₙₓAₙₓGₙₓGₙₓTₙₓ^{m}CₙₛAₙ | 18 | 50 | 101 |
| Gₙₛ^{m}CₙₓTₙₓ^{m}Cₙₓ^{m}CₙₓAₙₓAₙₓTₙₓAₙₓGₙₓTₙₓGₙₓGₙₓTₙₓ^{m}CₙₓAₙₓGₙₛTₙ | 18 | 50 | 102 |
| Gₙₛ^{m}CₙₓTₙₓAₙₓGₙₓGₙₓTₙₓ^{m}CₙₓAₙₓGₙₓGₙₓ^{m}CₙₓTₙₓGₙₓ^{m}CₙₓTₙₓTₙₛUₙ | 18 | 51 | 103 |
| TₙₛGₙₓTₙₓGₙₓTₙₓ^{m}CₙₓAₙₓ^{m}Cₙₓ^{m}CₙₓAₙₓGₙₓAₙₓGₙₓUₙₓAₙₓAₙₓ^{m}CₙₓAₙₓGₙₛTₙ | 20 | 51 | 104 |
| AₙₛGₙₓGₙₓTₙₓTₙₓGₙₓUₙₓGₙₓUₙₓ^{m}CₙₓAₙₓ^{m}Cₙₓ^{m}CₙₓAₙₓGₙₓAₙₓGₙₓTₙₓAₙₛAₙ | 20 | 51 | 105 |
| AₙₛGₙₓTₙₓAₙₓAₙₓ^{m}Cₙₓ^{m}CₙₓAₙₓ^{m}CₙₓAₙₓGₙₓGₙₓUₙₓUₙₓGₙₓTₙₓGₙₓTₙₓ^{m}Cₙₛ | 20 | 51 | 106 |
| Aₙ | | | |
| TₙₛTₙₓGₙₓAₙₓTₙₓ^{m}CₙₓAₙₓAₙₓGₙₓ^{m}CₙₓAₙₓGₙₓAₙₓGₙₓAₙₓAₙₓAₙₓGₙₓ^{m}Cₙₛ^{m}Cₙ | 20 | 51 | 107 |
| ^{m}CₙₛAₙₓ^{m}Cₙₓ^{m}Cₙₓ^{m}CₙₓUₙₓ^{m}CₙₓUₙₓGₙₓUₙₓGₙₓAₙₓUₙₓUₙₓUₙₓTₙₓAₙₓTₙₓAₙₛ | 20 | 51 | 108 |
| Aₙ | | | |
| Aₙₛ^{m}Cₙₓ^{m}Cₙₓ^{m}CₙₓAₙₓ^{m}Cₙₓ^{m}CₙₓAₙₓUₙₓ^{m}CₙₓAₙₓ^{m}Cₙₓ^{m}Cₙₓ^{m}CₙₓUₙₓ^{m}CₙₓTₙₓ | 20 | 51 | 109 |
| GₙₓTₙₛGₙ | | | |
| ^{m}Cₙₛ^{m}CₙₓTₙₓ^{m}CₙₓAₙₓAₙₓGₙₓGₙₓUₙₓ^{m}CₙₓAₙₓ^{m}Cₙₓ^{m}Cₙₓ^{m}CₙₓAₙₓ^{m}Cₙₓ^{m}CₙₓAₙₓ | 20 | 51 | 110 |
| Tₙₛ^{m}Cₙ | | | |
| TₙₛAₙₓAₙₓ^{m}CₙₓAₙₓGₙₓUₙₓ^{m}CₙₓUₙₓGₙₓAₙₓGₙₓUₙₓAₙₓGₙₓGₙₓAₙₛGₙ | 18 | 51 | 111 |
| GₙₛGₙₓ^{m}CₙₓAₙₓTₙₓUₙₓUₙₓ^{m}CₙₓUₙₓAₙₓGₙₓUₙₓUₙₓTₙₓGₙₓGₙₓAₙₛGₙ | 18 | 51 | 112 |
| AₙₛGₙₓ^{m}Cₙₓ^{m}CₙₓAₙₓGₙₓUₙₓ^{m}CₙₓGₙₓGₙₓUₙₓAₙₓAₙₓGₙₓTₙₓTₙₓ^{m}CₙₛTₙ | 18 | 51 | 113 |
| AₙₛGₙₓTₙₓTₙₓTₙₓGₙₓGₙₓAₙₓGₙₓAₙₓUₙₓGₙₓGₙₓ^{m}CₙₓAₙₓGₙₓTₙₛTₙ | 18 | 51 | 114 |
| ^{m}CₙₛTₙₓGₙₓAₙₓTₙₓTₙₓ^{m}CₙₓTₙₓGₙₓAₙₓAₙₓTₙₓTₙₓ^{m}CₙₓUₙₓUₙₓTₙₛ^{m}Cₙ | 18 | 53 | 115 |
| TₙₛTₙₓ^{m}CₙₓTₙₓTₙₓGₙₓTₙₓAₙₓ^{m}CₙₓTₙₓTₙₓ^{m}CₙₓAₙₓTₙₓ^{m}Cₙₓ^{m}CₙₓT^{m}CₙₛAₙ | 18 | 53 | 116 |
| ^{m}Cₙₛ^{m}CₙₓUₙₓ^{m}Cₙₓ^{m}CₙₓGₙₓGₙₓTₙₓTₙₓ^{m}CₙₓTₙₓGₙₓAₙₓAₙₓGₙₓGₙₓTₙₛGₙ | 18 | 53 | 117 |
| ^{m}CₙₛAₙₓTₙₓTₙₓUₙₓ^{m}CₙₓAₙₓUₙₓTₙₓ^{m}CₙₓAₙₓAₙₓ^{m}CₙₓTₙₓGₙₓTₙₓTₙₛGₙ | 18 | 53 | 118 |
| TₙₛTₙₓ^{m}Cₙₓ^{m}CₙₓTₙₓTₙₓAₙₓGₙₓ^{m}CₙₓTₙₓUₙₓ^{m}Cₙₓ^{m}CₙₓAₙₓGₙₓ^{m}Cₙₓ^{m}CₙₛAₙ | 18 | 53 | 119 |
| TₙₛAₙₓAₙₓGₙₓAₙₓ^{m}Cₙₓ^{m}CₙₓTₙₓGₙₓ^{m}CₙₓTₙₓ^{m}CₙₓAₙₓGₙₓ^{m}CₙₓUₙₓTₙₛ^{m}Cₙ | 18 | 53 | 120 |
| ^{m}CₙₛTₙₓTₙₓGₙₓGₙₓ^{m}CₙₓTₙₓ^{m}CₙₓTₙₓGₙₓGₙₓ^{m}Cₙₓ^{m}CₙₓTₓₙGₙₓUₙₓ^{m}Cₙₛ^{m}Cₙ | 18 | 53 | 121 |
| ^{m}CₙₛTₙₓ^{m}Cₙₓ^{m}CₙₓTₙₓUₙₓ^{m}Cₙₓ^{m}CₙₓAₙₓTₙₓGₙₓAₙₓ^{m}CₙₓTₙₓ^{m}CₙₓAₙₓAₙₛGₙ | 18 | 53 | 122 |
| ^{m}CₙₛTₙₓGₙₓAₙₓAₙₓGₙₓGₙₓTₙₓGₙₓTₙₓTₙₓ^{m}CₙₓTₙₓTₙₓGₙₓTₙₓAₙₛ^{m}Cₙ | 18 | 53 | 123 |
| TₙₛTₙₓ^{m}Cₙₓ^{m}CₙₓAₙₓGₙₓ^{m}Cₙₓ^{m}CₙₓAₙₓTₙₓTₙₓGₙₓTₙₓGₙₓTₙₓTₙₓGₙₛAₙ | 18 | 53 | 124 |
| ^{m}CₙₛTₙₓ^{m}CₙₓAₙₓGₙₓ^{m}CₙₓTₙₓUₙₓ^{m}CₙₓTₙₓTₓ^{m}Cₙₓ^{m}CₙₓTₙₓTₙₓAₙₓGₙₛmCₙ | 18 | 53 | 125 |
| Gₙₛ^{m}CₙₓTₙₓTₙₓ^{m}CₙₓUₙₓTₙₓ^{m}Cₙₓ^{m}CₙₓUₙₓTₙₓAₙₓGₙₓ^{m}CₙₓUₙₓTₙₓ^{m}Cₙₛ^{m}Cₙ | 18 | 53 | 126 |
| ^{m}CₙₛTₙₓ^{m}Cₙₓ^{m}CₙₓGₙₓGₙₓTₙₓTₙₓ^{m}CₙₓTₙₓGₙₓAₙₓAₙₓGₙₓGₙₓTₙₓGₙₓTₙₓTₙₓ^{m}Cₙₓ | 25 | 53 | 127 |
| TₙₓTₙₓGₙₓTₙₛAₙ | | | |
| ^{m}Cₙₛ^{m}CₙₓGₙₓGₙₓTₙₓTₙₓ^{m}CₙₓTₙₓGₙₓAₙₓAₙₓGₙₓGₙₓTₙₓGₙₓTₙₓTₙₓ^{m}CₙₓTₙₓTₙₓ | 22 | 53 | 128 |
| GₙₛTₙ | | | |
| ^{m}Cₙₛ^{m}CₙₓTₙₓ^{m}Cₙₓ^{m}CₙₓGₙₓGₙₓTₙₓTₙₓ^{m}CₙₓTₙₓGₙₓAₙₓAₙₓGₙₓGₙₓTₙₓGₙₓTₙₓ | 25 | 53 | 129 |
| Tₙₓ^{m}CₙₓTₙₓTₙₓGₙₛTₙ | | | |
| Tₙₛ^{m}Cₙₓ^{m}CₙₓGₙₓGₙₓTₙₓTₙₓ^{m}CₙₓTₙₓGₙₓAₙₓAₙₓGₙₓGₙₓTₙₓGₙₓTₙₓTₙₓ^{m}CₙₓTₙₓ | 22 | 53 | 130 |
| TₙₛGₙ | | | |
| TₙₛGₙₓ^{m}Cₙₓ^{m}CₙₓTₙₓ^{m}Cₙₓ^{m}CₙₓGₙₓGₙₓTₙₓTₙₓ^{m}CₙₓTₙₓGₙₓAₙₓAₙₓGₙₓGₙₓTₙₓ | 25 | 53 | 131 |
| GₙₓTₙₓTₙₓ^{m}CₙₓTₙₛTₙ | | | |
| ^{m}Cₙₛ^{m}CₙₓGₙₓGₙₓTₙₓTₙₓ^{m}CₙₓTₙₓGₙₓAₙₓAₙₓGₙₓGₙₓTₙₓGₙₓTₙₓTₙₛ^{m}Cₙ | 18 | 53 | 132 |
| ^{m}CₙₛTₙₓ^{m}Cₙₓ^{m}CₙₓGₙₓGₙₓTₙₓTₙₓ^{m}CₙₓTₙₓGₙₓAₙₓAₙₓGₙₓGₙₓTₙₓGₙₓTₙₓTₙₛ^{m}Cₙ | 20 | 53 | 133 |
| ^{m}Cₙₛ^{m}CₙₓTₙₓ^{m}Cₙₓ^{m}CₙₓGₙₓGₙₓTₙₓTₙₓ^{m}CₙₓTₙₓGₙₓAₙₓAₙₓGₙₓGₙₓTₙₓGₙₓTₙₛ | 21 | 53 | 134 |
| Tₙₓ^{m}Cₙ | | | |
| Gₙₛ^{m}Cₙₓ^{m}CₙₓTₙₓ^{m}Cₙₓ^{m}CₙₓGₙₓGₙₓTₙₓTₙₓ^{m}CₙₓTₙₓGₙₓAₙₓAₙₓGₙₓGₙₓTₙₓGₙₓ | 22 | 53 | 135 |
| TₙₓTₙₛ^{m}Cₙ | | | |
| UₙₛUₙₓGₙₓUₙₓAₙₓ^{m}CₙₓUₙₓUₙₓ^{m}CₙₓAₙₓUₙₓ^{m}Cₙₓ^{m}Cₙₓ^{m}CₙₓAₙₓ^{m}CₙₓUₙₓGₙₓAₙₓ | 25 | 53 | 136 |
| UₙₓUₙₓ^{m}CₙₓUₙₓGₙₛAₙ | | | |
| UₙₛGₙₓUₙₓUₙₓ^{m}CₙₓUₙₓUₙₓGₙₓUₙₓAₙₓ^{m}CₙₓUₙₓUₙₓ^{m}CₙₓAₙₓUₙₓ^{m}Cₙₓ^{m}Cₙₓ^{m}Cₙₓ | 25 | 53 | 137 |
| Aₙₓ^{m}CₙₓUₙₓGₙₓAₙₛUₙ | | | |
| GₙₛUₙₓUₙₓ^{m}CₙₓUₙₓGₙₓAₙₓAₙₓGₙₓGₙₓUₙₓGₙₓUₙₓUₙₓ^{m}CₙₓUₙₓUₙₓGₙₓUₙₓAₙₓ | 25 | 53 | 138 |
| ^{m}CₙₓUₙₓUₙₓ^{m}CₘCₙₛAₙ | | | |
| ^{m}Cₙₛ^{m}CₙₓGₙₓGₙₓUₙₓUₙₓ^{m}CₙₓUₙₓGₙₓAₙₓAₙₓGₙₓGₙₓUₙₓGₙₓUₙₓUₙₓ^{m}CₙₓUₙₓ | 25 | 53 | 139 |
| UₙₓGₙₓUₙₓAₙₓ^{m}CₙₛUₙ | | | |
| Uₙₛ^{m}Cₙₓ^{m}CₙₓGₙₓGₙₓUₙₓUₙₓ^{m}CₙₓUₙₓGₙₓAₙₓAₙₓGₙₓGₙₓUₙₓGₙₓUₙₓUₙₓ^{m}Cₙₓ | 25 | 53 | 140 |
| UₙₓUₙₓGₙₓUₙₓAₙₛ^{m}Cₙ | | | |
| ^{m}CₙₛUₙₓ^{m}Cₙₓ^{m}CₙₓGₙₓGₙₓUₙₓUₙₓ^{m}CₙₓUₙₓGₙₓAₙₓAₙₓGₙₓGₙₓUₙₓGₙₓUₙₓUₙₓ | 25 | 53 | 141 |
| ^{m}CₙₓUₙₓUₙₓGₙₓUₙₛAₙ | | | |
| UₙₛUₙₓ^{m}CₙₓUₙₓGₙₓAₙₓAₙₓGₙₓGₙₓUₙₓGₙₓUₙₓUₙₓ^{m}CₙₓUₙₓUₙₓGₙₛUₙ | 18 | 53 | 142 |
| GₙₛGₙₓUₙₓUₙₓ^{m}CₙₓUₙₓGₙₓAₙₓAₙₓGₙₓGₙₓUₙₓGₙₓUₙₓUₙₓ^{m}CₙₓUₙₓUₙₓGₙₛUₙ | 20 | 53 | 143 |
| ^{m}Cₙₛ^{m}CₙₓUₙₓ^{m}Cₙₓ^{m}CₙₓGₙₓGₙₓUₙₓUₙₓ^{m}CₙₓUₙₓGₙₓAₙₓAₙₓGₙₓGₙₓUₙₓGₙₓUₙₓ | 25 | 53 | 144 |
| Uₙₓ^{m}CₙₓUₙₓUₙₓGₙₛUₙ | | | |
| UₙₛGₙₓUₙₓUₙₓGₙₓ^{m}Cₙₓ^{m}CₙₓUₙₓ^{m}Cₙₓ^{m}CₙₓGₙₓGₙₓUₙₓUₙₓ^{m}CₙₓUₙₓGₙₓAₙₓAₙₓ | 30 | 53 | 145 |
| GₙₓGₙₓUₙₓGₙₓUₙₓUₙₓ^{m}CₙₓUₙₓUₙₓGₙₛUₙ | | | |
| Gₙₛ^{m}Cₙₓ^{m}CₙₓUₙₓ^{m}Cₙₓ^{m}CₙₓGₙₓGₙₓUₙₓUₙₓ^{m}CₙₓUₙₓGₙₓAₙₓAₙₓGₙₓGₙₓUₙₓGₙₓ | 25 | 53 | 146 |
| UₙₓUₙₓ^{m}CₙₓUₙₓUₙₛGₙ | | | |
| UₙₛGₙₓ^{m}Cₙₓ^{m}CₙₓUₙₓ^{m}Cₙₓ^{m}CₙₓGₙₓGₙₓUₙₓUₙₓ^{m}CₙₓUₙₓGₙₓAₙₓAₙₓGₙₓGₙₓUₙₓ | 25 | 53 | 147 |
| GₙₓUₙₓUₙₓ^{m}CₙₓUₙₛUₙ | | | |
| UₙₛUₙₓ^{m}CₙₓUₙₓGₙₓAₙₓAₙₓGₙₓGₙₓUₙₓGₙₓUₙₓUₙₓ^{m}CₙₛUₙ | 15 | 53 | 148 |
| ^{m}CₙₛGₙₓGₙₓUₙₓUₙₓ^{m}CₙₓUₙₓGₙₓAₙₓAₙₓGₙₓGₙₓUₙₓGₙₓUₙₓUₙₓ^{m}CₙₛUₙ | 18 | 53 | 149 |
| Uₙₛ^{m}Cₙₓ^{m}CₙₓGₙₓGₙₓUₙₓUₙₓ^{m}CₙₓUₙₓGₙₓAₙₓAₙₓGₙₓGₙₓUₙₓGₙₓUₙₓUₙₓ^{m}Cₙₛ | 20 | 53 | 150 |
| Uₙ | | | |
| UₙₛUₙₓGₙₓ^{m}Cₙₓ^{m}CₙₓUₙₓ^{m}Cₙₓ^{m}CₙₓGₙₓGₙₓUₙₓUₙₓ^{m}CₙₓUₙₓGₙₓAₙₓAₙₓGₙₓGₙₓ | 25 | 53 | 151 |
| UₙₓGₙₓUₙₓUₙₓ^{m}CₙₛUₙ | | | |
| GₙₛUₙₓUₙₓGₙₓ^{m}Cₙₓ^{m}CₙₓUₙₓ^{m}Cₙₓ^{m}CₙₓGₙₓGₙₓUₙₓUₙₓ^{m}CₙₓUₙₓGₙₓAₙₓAₙₓGₙₓ | 25 | 53 | 44 |
| GₙₓUₙₓGₙₓUₙₓUₙₛ^{m}Cₙ | | | |
| ^{m}Cₙₛ^{m}CₙₓUₙₓ^{m}Cₙₓ^{m}CₙₓGₙₓGₙₓUₙₓUₙₓ^{m}CₙₓUₙₓGₙₓAₙₓAₙₓGₙₓGₙₓUₙₓGₙₓUₙₛ | 20 | 53 | 152 |
| Uₙ | | | |
| UₙₛGₙₓUₙₓUₙₓGₙₓ^{m}Cₙₓ^{m}CₙₓUₙₓ^{m}Cₙₓ^{m}CₙₓGₙₓGₙₓUₙₓUₙₓ^{m}CₙₓUₙₓGₙₓAₙₓAₙₓ | 25 | 53 | 153 |
| GₙₓGₙₓUₙₓGₙₛUₙₛUₙ | | | |
| ^{m}CₙₛUₙₓ^{m}Cₙₓ^{m}CₙₓGₙₓGₙₓUₙₓUₙₓ^{m}CₙₓUₙₓGₙₓAₙₓAₙₓGₙₓGₙₓUₙₓGₙₛUₙ | 18 | 53 | 154 |
| ^{m}CₙₛUₙₓGₙₓUₙₓUₙₓGₙₓ^{m}Cₙₓ^{m}CₙₓUₙₓ^{m}Cₙₓ^{m}CₙₛGₙₓGₙₓUₙₓUₙₓ^{m}CₙₓUₙₓGₙₓAₙₓ | 25 | 53 | 155 |
| AₙₓGₙₓGₙₓUₙₓGₙₛUₙ | | | |
| Aₙₛ^{m}CₙₓUₙₓGₙₓUₙₓUₙₓGₙₓ^{m}Cₙₓ^{m}CₙₓUₙₓ^{m}Cₙₓ^{m}CₙₓGₙₓGₙₓUₙₓUₙₓ^{m}CₙₓUₙₓGₙₓ | 25 | 53 | 156 |
| AₙₓAₙₓGₙₓGₙₓUₙₛGₙ | | | |
| ^{m}CₙₛAₙₓUₙₓUₙₓ^{m}CₙₓAₙₓAₙₓ^{m}CₙₓUₙₓGₙₓUₙₓUₙₓGₙₓ^{m}Cₙₓ^{m}CₙₓUₙₓ^{m}Cₙₓ^{m}Cₙₓ | 31 | 53 | 80 |
| GₙₓGₙₓUₙₓUₙₓ^{m}CₙₓUₙₓGₙₓAₙₓAₙₓGₙₓGₙₓUₙₛGₙ | | | |
| Uₙₛ^{m}Cₙₓ^{m}CₙₓGₙₓGₙₓUₙₓUₙₓ^{m}CₙₓUₙₓGₙₓAₙₓAₙₓGₙₓGₙₛUₙ | 15 | 53 | 157 |
| UₙₛUₙₓGₙₓ^{m}Cₙₓ^{m}CₙₓUₙₓ^{m}Cₙₓ^{m}CₙₓGₙₓGₙₓUₙₓUₙₓ^{m}CₙₓUₙₓGₙₓAₙₓAₙₓGₙₓGₙₛ | 20 | 53 | 158 |
| Uₙ | | | |
| AₙₛAₙₓ^{m}CₙₓUₙₓGₙₓUₙₓUₙₓGₙₓ^{m}Cₙₓ^{m}CₙₓUₙₓ^{m}Cₙₓ^{m}CₙₓGₙₓGₙₓUₙₓUₙₓ^{m}CₙₓUₙₓ | 25 | 53 | 159 |
| GₙₓAₙₓAₙₓGₙₓGₙₛUₙ | | | |
| UₙₛGₙₓ^{m}Cₙₓ^{m}CₙₓUₙₓ^{m}Cₙₓ^{m}CₙₓGₙₓGₙₓUₙₓUₙₓ^{m}CₙₓUₙₓGₙₓAₙₓAₙₓGₙₛGₙ | 18 | 53 | 160 |
| ^{m}CₙₛAₙₓAₙₓ^{m}CₙₓUₙₓGₙₓUₙₓUₙₓGₙₓ^{m}Cₙₓ^{m}CₙₓUₙₓ^{m}Cₙₓ^{m}CₙₓGₙₓGₙₓUₙₓUₙₓ^{m}Cₙₓ | 25 | 53 | 161 |
| UₙₓGₙₓAₙₓAₙₓGₙₛGₙ | | | |
| UₙₛGₙₓUₙₓUₙₓGₙₓ^{m}Cₙₓ^{m}CₙₓUₙₓ^{m}Cₙₓ^{m}CₙₛGₙₓGₙₓUₙₓUₙₓ^{m}CₙₓUₙₓGₙₓAₙₓAₙₛ | 20 | 53 | 162 |
| Gₙ | | | |
| UₙₛGₙₓUₙₓUₙₓGₙₓ^{m}Cₙₓ^{m}CₙₓUₙₓ^{m}Cₙₓ^{m}CₙₓGₙₓGₙₓUₙₓUₙₓ^{m}CₙₓUₙₓGₙₓAₙ | 18 | 53 | 163 |
| UₙₛUₙₓGₙₓ^{m}Cₙₓ^{m}CₙₓUₙₓ^{m}Cₙₓ^{m}CₙₓGₙₓGₙₓUₙₓUₙₓ^{m}CₙₓUₙₓGₙ | 15 | 53 | 164 |
| ^{m}CₙₛUₙₓGₙₓUₙₓUₙₓGₙₓ^{m}Cₙₓ^{m}CₙₓUₙₓ^{m}Cₙₓ^{m}CₙₓGₙₓGₙₓUₙₓUₙₓ^{m}CₙₓUₙₛGₙ | 18 | 53 | 165 |
| Uₙₛ^{m}CₙₓAₙₓUₙₓUₙₓ^{m}CₙₓAₙₓAₙₓ^{m}CₙₓUₙₓGₙₓUₙₓUₙₓGₙₓ^{m}Cₙₓ^{m}CₙₓUₙₓ^{m}Cₙₓ^{m}Cₙₓ | 25 | 53 | 166 |
| GₙₓGₙₓUₙₓUₙₓ^{m}CₙₛUₙ | | | |
| UₙₛUₙₓGₙₓGₙₓ^{m}CₙₓUₙₓ^{m}CₙₓUₙₓGₙₓGₙₓ^{m}Cₙₓ^{m}CₙₓUₙₓGₙₓUₙₓ^{m}Cₙₓ^{m}CₙₓUₙₓAₙₓ | 25 | 53 | 167 |
| AₙₓGₙₓAₙₓ^{m}Cₙₓ^{m}CₙₛUₙ | | | |
| ^{m}CₙₛAₙₓAₙₓGₙₓ^{m}CₙₓUₙₓUₙₓGₙₓGₙₓ^{m}CₙₓUₙₓ^{m}CₙₓUₙₓGₙₓGₙₓ^{m}Cₙₓ^{m}CₙₓUₙₓGₙₓ | 25 | 53 | 168 |
| Uₙₓ^{m}Cₙₓ^{m}CₙₓUₙₓAₙₛAₙ | | | |
| ^{m}CₙₛAₙₓGₙₓ^{m}CₙₓGₙₓGₙₓTₙₓAₙₓAₙₓTₙₓGₙₓAₙₓGₙₓTₙₓTₙₓ^{m}CₙₓTₙₓTₙₓ^{m}Cₙₓ^{m}Cₙₓ | 25 | 52 | 169 |
| AₙₓAₙₓ^{m}CₙₓTₙₛGₙ | | | |
| AₙₛTₙₓTₙₓTₙₓ^{m}CₙₓTₙₓAₙₓGₙₓTₙₓTₙₓTₙₓGₙₓGₙₓAₙₓGₙₓAₙₓTₙₓGₙₓGₙₓ^{m}Cₙₓ | 26 | 51 | 170 |
| AₙₓGₙₓTₙₓTₙₓTₙₛ^{m}Cₙ | | | |
| ^{m}CₙₛAₙₓTₙₓ^{m}CₙₓAₙₓAₙₓGₙₓGₙₓAₙₓAₙₓGₙₓAₙₓTₙₓGₙₓGₙₓ^{m}CₙₓAₙₓTₙₓTₙₓTₙₓ | 26 | 51 | 171 |
| ^{m}CₙₓTₙₓAₙₓGₙₓTₙₓTₙ | | | |
| GₙₛAₙₓGₙₓ^{m}CₙₓAₙₓGₙₓGₙₓTₙₓAₙₓ^{m}Cₙₓ^{m}CₙₓTₙₓ^{m}Cₙₓ^{m}CₙₓAₙₓAₙₓ^{m}CₙₓAₙₓTₙₓ | 26 | 51 | 172 |
| ^{m}CₙₓAₙₓAₙₓGₙₓGₙₓAₙₛAₙ | | | |
| Aₙₛ^{m}CₙₓAₙₓTₙₓ^{m}CₙₓAₙₓAₙₓGₙₓGₙₓAₙₓAₙₓGₙₓAₙₓTₙₓGₙₓGₙₓ^{m}CₙₓAₙₓTₙₓTₙₓ | 30 | 51 | 173 |
| Tₙₓ^{m}CₙₓTₙₓAₙₓGₙₓTₙₓTₙₓTₙₓGₙₛGₙ | | | |
| ^{m}CₙₛTₙₓⁿCₙₓ^{m}CₙₓAₙₓAₙₓ^{m}CₙₓAₙₓTₙₓ^{m}CₙₓAₙₓAₙₓGₙₓGₙₓAₙₓAₙₓGₙₓAₙₓTₙₓ | 30 | 51 | 174 |
| GₙₓGₙₓ^{m}CₙₓAₙₓTₙₓTₙₓTₙₓ^{m}CₙₓTₙₓAₙₓGₙ | | | |
| Tₙₛ^{m}CₙₓAₙₓAₙₓGₙₓGₙₓAₙₓAₙₓGₙₓAₙₓTₙₓGₙₓGₙₓ^{m}CₙₓAₙₓTₙₓTₙₓTₙₓ^{m}CₙₓTₙ | 20 | 51 | 175 |
| Aₙₛ^{m}CₙₓAₙₓTₙₓ^{m}CₙₓAₙₓAₙₓGₙₓGₙₓAₙₓAₙₓGₙₓAₙₓTₙₓGₙₓGₙₓ^{m}CₙₓAₙₓTₙₓTₙₓ | 25 | 51 | 176 |
| Tₙₓ^{m}CₙₓTₙₓAₙₛGₙ | | | |
| ^{m}Cₙₛ^{m}CₙₓAₙₓGₙₓAₙₓGₙₓ^{m}CₙₓAₙₓGₙₓGₙₓTₙₓAₙₓ^{m}Cₙₓ^{m}CₙₓTₙₓ^{m}Cₙₓ^{m}CₙₓAₙₓ | 23 | 51 | 29 |
| Aₙₓ^{m}CₙₓAₙₓTₙₛ^{m}Cₙ | | | |
| TₙₛGₙₓGₙₓ^{m}CₙₓAₙₓTₙₓTₙₓTₙₓ^{m}CₙₓTₙₓAₙₓGₙₓTₙₓTₙₓTₙₓGₙₛGₙ | 17 | 51 | 28 |
| ^{m}CₙₛAₙₓGₙₓAₙₓGₙₓ^{m}CₙₓTₙₓ^{m}CₙₓAₙₓGₙₓAₙₓTₙₓ^{m}CₙₓTₙₓTₙₓ^{m}CₙₓTₙₓAₙₓAₙₓ | 25 | 50 | 177 |
| ^{m}CₙₓTₙₓTₙₓ^{m}Cₙₓ^{m}CₙₛTₙ | | | |
| ^{m}CₙₛTₙₓTₙₓAₙₓ^{m}CₙₓAₙₓGₙₓGₙₓ^{m}CₙₓTₙₓ^{m}Cₙₓ^{m}CₙₓAₙₓAₙₓTₙₓGₙₓTₙₓGₙₓ | 25 | 50 | 178 |
| GₙₓTₙₓ^{m}CₙₓAₙₓGₙₛTₙ | | | |
| AₙₛTₙₓGₙₓGₙₓGₙₓAₙₓTₙₓ^{m}Cₙₓ^{m}CₙₓAₙₓGₙₓTₙₓAₙₓTₙₓAₙₓ^{m}CₙₓTₙₓTₙₓAₙₓ^{m}Cₙₓ | 25 | 50 | 179 |
| AₙₓGₙₓGₙₓ^{m}CₙₛTₙ | | | |
| AₙₛGₙₓAₙₓGₙₓAₙₓAₙₓTₙₓGₙₓGₙₓGₙₓAₙₓTₙₓ^{m}Cₙₓ^{m}CₙₓAₙₓGₙₓTₙₓAₙₓTₙₓAₙₓ | 25 | 50 | 180 |
| ^{m}CₙₓTₙₓTₙₓAₙₛ^{m}Cₙ | | | |
| ^{m}Cₙₛ^{m}CₙₓAₙₓ^{m}CₙₓTₙₓ^{m}CₙₓAₙₓGₙₓAₙₓGₙₓ^{m}CₙₓTₙₓ^{m}CₙₓAₙₓGₙₓAₙₓTₙₓ^{m}CₙₓTₙₓ | 29 | 50 | 181 |
| Tₙₓ^{m}CₙₓTₙₓAₙₓAₙₓ^{m}CₙₓTₙₓTₙₓ^{m}Cₙₛ^{m}Cₙ | | | |
| GₙₛGₙₓGₙₓAₙₓTₙₓ^{m}Cₙₓ^{m}CₙₓAₙₓGₙₓTₙₓAₙₓTₙₓAₙₓ^{m}CₙₓTₙₓTₙₓAₙₓ^{m}CₙₓAₙₓGₙₓ | 25 | 50 | 182 |
| Gₙₓ^{m}CₙₓTₙₓ^{m}Cₙₛ^{m}Cₙ | | | |
| ^{m}CₙₛTₙₓTₙₓ^{m}Cₙₓ^{m}CₙₓAₙₓ^{m}CₙₓTₙₓ^{m}CₙₓAₙₓGₙₓAₙₓGₙₓ^{m}CₙₓTₙₓ^{m}CₙₓAₙₓGₙₓAₙₓ | 27 | 50 | 183 |
| Tₙₓ^{m}CₙₓTₙₓTₙₓ^{m}CₙₓTₙₓAₙₛAₙ | | | |
| TₙₛAₙₓ^{m}CₙₓTₙₓTₙₓ^{m}CₙₓAₙₓTₙₓ^{m}Cₙₓ^{m}Cₙₓ^{m}CₙₓAₙₓ^{m}CₙₓTₙₓGₙₓAₙₓTₙₓTₙₓ^{m}Cₙₓ | 25 | 53 | 184 |
| TₙₓGₙₓAₙₓAₙₓTₙₛTₙ | | | |
| ^{m}CₙₛTₙₓGₙₓAₙₓAₙₓGₙₓGₙₓTₙₓGₙₓTₙₓTₙₓ^{m}CₙₓTₙₓTₙₓGₙₓTₙₓAₙₓ^{m}CₙₓTₙₓTₙₓ | 25 | 53 | 185 |
| ^{m}CₙₓAₙₓTₙₓ^{m}Cₙₛ^{m}Cₙ | | | |
| ^{m}CₙₛTₙₓGₙₓTₙₓTₙₓGₙₓ^{m}Cₙₓ^{m}CₙₓTₙₓ^{m}Cₙₓ^{m}CₙₓGₙₓGₙₓTₙₓTₙₓ^{m}CₙₓTₙₓGₙₓAₙₓ | 25 | 53 | 186 |
| AₙₓGₙₓGₙₓTₙₓGₙₛTₙ | | | |
| ^{m}CₙₛTₙₓGₙₓAₙₓAₙₓGₙₓGₙₓTₙₓGₙₓTₙₓTₙₓ^{m}CₙₓTₙₓTₙₓGₙₓTₙₓAₙₓ^{m}CₙₓTₙₓTₙₓ | 25 | 53 | 185 |
| ^{m}CₙₓAₙₓTₙₓ^{m}Cₙₛ^{m}Cₙ | | | |
| ^{m}CₙₛAₙₓTₙₓTₙₓ^{m}CₙₓAₙₓAₙₓ^{m}CₙₓTₙₓGₙₓTₙₓTₙₓGₙₓ^{m}Cₙₓ^{m}CₙₓTₙₓ^{m}Cₙₓ^{m}CₙₓGₙₓ | 31 | 53 | 187 |
| GₙₓTₙₓTₙₓ^{m}CₙₓTₙₓGₙₓAₙₓAₙₓGₙₓGₙₓTₙₛGₙ | | | |
| ^{m}CₙₛTₙₓGₙₓTₙₓTₙₓGₙₓ^{m}Cₙₓ^{m}CₙₓTₙₓ^{m}Cₙₓ^{m}CₙₓGₙₓGₙₓTₙₓTₙₓ^{m}CₙₓTₙₛGₙ | 18 | 53 | 188 |
| AₙₛTₙₓTₙₓ^{m}CₙₓTₙₓTₙₓTₙₓ^{m}CₙₓAₙₓAₙₓ^{m}CₙₓTₙₓAₙₓGₙₓAₙₓAₙₓTₙₓAₙₓAₙₓAₙₓ | 22 | 53 | 189 |
| AₙₛGₙ | | | |
| GₙₛAₙₓTₙₓ^{m}CₙₓTₙₓGₙₓTₙₓ^{m}CₙₓAₙₓAₙₓAₙₓTₙₓ^{m}CₙₓGₙₓ^{m}Cₙₓ^{m}CₙₓTₙₓGₙₓ^{m}Cₙₓ | 25 | 44 | 190 |
| AₙₓGₙₓGₙₓTₙₓAₙₛAₙ | | | |
| AₙₛTₙₓAₙₓAₙₓTₙₓGₙₓAₙₓAₙₓAₙₓAₙₓ^{m}CₙₓGₙₓ^{m}Cₙₓ^{m}CₙₓGₙₓ^{m}Cₙₓ^{m}CₙₓAₙₓTₙₓ | 25 | 44 | 191 |
| TₙₓTₙₓ^{m}CₙₓTₙₓ^{m}CₙₛAₙ | | | |
| AₙₛAₙₓAₙₓ^{m}CₙₓTₙₓGₙₓTₙₓTₙₓ^{m}CₙₓAₙₓGₙₓ^{m}CₙₓTₙₓTₙₓ^{m}CₙₓTₙₓGₙₓTₙₓTₙₓAₙₓ | 25 | 44 | 192 |
| Gₙₓ^{m}Cₙₓ^{m}Cₙₓ^{m}Aₙₛ^{m}Cₙ | | | |
| TₙₛTₙₓGₙₓTₙₓGₙₓTₙₓ^{m}CₙₓTₙₓTₙₓTₙₓ^{m}CₙₓTₙₓGₙₓAₙₓGₙₓAₙₓAₙₓAₙₓ^{m}CₙₓTₙₓ | 25 | 44 | 193 |
| GₙₓTₙₓTₙₓ^{m}CₙₛAₙ | | | |
| ^{m}Cₙₛ^{m}CₙₓAₙₓAₙₓTₙₓTₙₓ^{m}CₙₓTₙₓ^{m}CₙₓAₙₓGₙₓGₙₓAₙₓAₙₓTₙₓTₙₓTₙₓGₙₓTₙₓGₙₓ | 25 | 44 | 194 |
| Tₙₓ^{m}CₙₓTₙₓTₙₛTₙ | | | |
| TₙₛGₙₓTₙₓTₙₓ^{m}CₙₓAₙₓGₙₓ^{m}CₙₓTₙₓTₙₓ^{m}CₙₓTₙₓGₙₓTₙₓTₙₓAₙₓGₙₓ^{m}Cₙₓ^{m}CₙₓAₙₓ | 24 | 44 | 195 |
| ^{m}CₙₓTₙₓGₙₛAₙ | | | |
| TₙₛTₙₓTₙₓGₙₓTₙₓGₙₓTₙₓ^{m}CₙₓTₙₓTₙₓTₙₓ^{m}CₙₓTₙₓGₙₓAₙₓGₙₓAₙₓAₙₓAₙₛ^{m}Cₙ | 20 | 44 | 196 |
| ^{m}CₙₛGₙₓ^{m}Cₙₓ^{m}CₙₓGₙₓ^{m}Cₙₓ^{m}CₙₓAₙₓTₙₓTₙₓTₙₓ^{m}CₙₓTₙₓ^{m}CₙₓAₙₓAₙₓ^{m}CₙₓAₙₛ | 19 | 44 | 197 |
| Gₙ | | | |
| AₙₛTₙₓ^{m}CₙₓTₙₓGₙₓTₙₓ^{m}CₙₓAₙₓAₙₓAₙₓTₙₓ^{m}CₙₓGₙₓ^{m}Cₙₓ^{m}CₙₓTₙₓGₙₓ^{m}CₙₓAₙₛ | 20 | 44 | 198 |
| Gₙ | | | |
| Gₙₛ^{m}Cₙₓ^{m}CₙₓAₙₓTₙₓ^{m}Cₙₓ^{m}CₙₓTₙₓGₙₓGₙₓAₙₓGₙₓTₙₓTₙₓ^{m}Cₙₓ^{m}CₙₓTₙₓGₙₓTₙₓ | 25 | 45 | 199 |
| AₙₓAₙₓGₙₓAₙₓTₙₛAₙ | | | |
| ^{m}Cₙₛ^{m}CₙₓAₙₓAₙₓTₙₓGₙₓ^{m}Cₙₓ^{m}CₙₓAₙₓTₙₓ^{m}Cₙₓ^{m}CₙₓTₙₓGₙₓGₙₓAₙₓGₙₓTₙₓTₙₓ | 25 | 45 | 200 |
| ^{m}Cₙₓ^{m}CₙₓTₙₓGₙₓTₙₛAₙ | | | |
| ^{m}CₙₛTₙₛGₙₓAₙₓ^{m}CₙₓAₙₓAₙₓ^{m}CₙₓAₙₓGₙₓTₙₓTₙₓTₙₓGₙₓ^{m}Cₙₓ^{m}CₙₓGₙₓ^{m}CₙₓTₙₓ | 25 | 45 | 201 |
| Gₙₓ^{m}Cₙₓ^{m}Cₙₓ^{m}Cₙₓ^{m}CₙₓAₙₛAₙ | | | |
| TₙₛTₙₓTₙₓGₙₓAₙₓGₙₓGₙₓAₙₓTₙₓTₙₓGₙₓ^{m}CₙₓTₙₓGₙₓAₙₓAₙₓTₙₓTₙₓAₙₓTₙₓTₙₓ | 25 | 45 | 202 |
| Tₙₓ^{m}CₙₓTₙₛTₙ | | | |
| GₙₛAₙₓ^{m}CₙₓAₙₓGₙₓ^{m}CₙₓTₙₓGₙₓTₙₓTₙₓTₙₓGₙₓ^{m}CₙₓAₙₓGₙₓAₙₓ^{m}Cₙₓ^{m}CₙₓTₙₓ | 25 | 45 | 203 |
| ^{m}Cₙₓ^{m}CₙₓTₙₓGₙₓ^{m}Cₙₛ^{m}Cₙ | | | |
| TₙₛGₙₓTₙₓTₙₓTₙₓTₙₓTₙₓGₙₓAₙₓGₙₓGₙₓAₙₓTₙₓTₙₓGₙₓ^{m}CₙₓTₙₓGₙₓAₙₛAₙ | 20 | 45 | 204 |
| Gₙₛ^{m}CₙₓTₙₓGₙₓAₙₓAₙₓTₙₓTₙₓAₙₓTₙₓTₙₓTₙₓ^{m}CₙₓTₙₓTₙₓ^{m}Cₙₓ^{m}Cₙₓ^{m}Cₙₛ^{m}Cₙ | 19 | 45 | 205 |
| Gₙₓ^{m}Cₙₓ^{m}Cₙₓ^{m}CₙₓAₙₓAₙₓTₙₓGₙₓ^{m}Cₙₓ^{m}CₙₓAₙₓTₙₓ^{m}Cₙₓ^{m}CₙₓTₙₓGₙₛGₙ | 17 | 45 | 06 |
| ^{m}Cₙₛ^{m}CₙₓAₙₓAₙₓTₙₓGₙₓ^{m}Cₙₓ^{m}CₙₓAₙₓTₙₓ^{m}Cₙₓ^{m}CₙₓTₙₓGₙₓGₙₓAₙₓGₙₓTₙₓTₙₓ | 26 | 45 | 207 |
| ^{m}Cₙₓ^{m}CₙₓTₙₓGₙₓTₙₓAₙₛAₙ | | | |

TABLE M
Modified oligonucleotides complementary to Exon 2 of
dystrophin pre-mRNA (SEQ ID NO: 218)

| | SEQ ID | | | Seq ID | Seq ID |
|---|---|---|---|---|---|
| Sequence | NO: | Length | Exon | 218 start | 218 stop |
| ^{m}Cₙₛ^{m}Cₙₓ^{m}CₙₓAₙₓUₙₓUₙₓUₙₓUₙₓGₙₓUₙₓGₙₓAₙₓAₙₓUₙₓGₙₓUₙₓUₙₓ | 3 | 24 | 2 | 119 | 142 |
| UₙₓUₙₓ^{m}CₙₓUₙₓUₙₓUₙₛUₙ | | | | | |

TABLE N
Modified oligonucleotides complementary to Exon 8 of
dystrophin pre-mRNA (SEQ ID NO: 219)

| | SEQ | | | Seq ID | Seq ID |
|---|---|---|---|---|---|
| | ID | | | 219 | 219 |
| Sequence | NO: | Length | Exon | Start | Stop |
| GₙₛAₙₓUₙₓAₙₓGₙₓGₙₓUₙₓGₙₓGₙₓUₙₓAₙₓUₙₓ^{m}CₙₓAₙₓAₙₓ^{m}CₙₓAₙₓUₙₓ^{m}Cₙₓ | 66 | 25 | 8 | 94 | 118 |
| UₙₓGₙₓUₙₓAₙₓAₙₛGₙ | | | | | |
| GₙₛAₙₓUₙₓAₙₓGₙₓGₙₓUₙₓGₙₓGₙₓUₙₓAₙₓUₙₓ^{m}CₙₓAₙₓAₙₓ^{m}CₙₓAₙₓUₙₓ^{m}Cₙₓ | 64 | 24 | 8 | 95 | 118 |
| UₙₓGₙₓUₙₓAₙₛAₙ | | | | | |
| GₙₛAₙₓUₙₓAₙₓGₙₓGₙₓUₙₓGₙₓGₙₓUₙₓAₙₓUₙₓ^{m}CₙₓAₙₓAₙₓ^{m}CₙₓAₙₓUₙₓ^{m}Cₙₓ | 65 | 21 | 8 | 98 | 118 |
| UₙₛGₙ | | | | | |
| GₙₛUₙₓAₙₓ^{m}CₙₓAₙₓUₙₓUₙₓAₙₓAₙₓGₙₓAₙₓUₙₓGₙₓGₙₓAₙₓ^{m}CₙₓUₙₓUₙₛ^{m}Cₙ | 5 | 19 | 8 | 126 | 144 |
| ^{m}CₙₛUₙₓUₙₓ^{m}Cₙₓ^{m}CₙₓUₙₓGₙₓGₙₓAₙₓUₙₓGₙₓGₙₓ^{m}CₙₓUₙₓUₙₓ^{m}CₙₓAₙₓAₙₛUₙ | 4 | 19 | 8 | 184 | 202 |

TABLE O
Modified oligonucleotides complementary to Exon 43 of
dystrophin pre-mRNA (SEQ ID NO: 220)

| | SEQ | | | Seq ID | Seq ID |
|---|---|---|---|---|---|
| | ID | | | 220 | 220 |
| Sequence | NO: | Length | Exon | start | stop |
| ^{m}CₙₛGₙₓAₙₓ^{m}Cₙₓ^{m}CₙₓUₙₓGₙₓAₙₓGₙₓ^{m}CₙₓUₙₓUₙₓUₙₓGₙₓUₙₓUₙₓGₙₓUₙₓAₙₛGₙ | 54 | 20 | 43 | 116 | 135 |
| ^{m}CₙₛGₙₓUₙₓUₙₓGₙₓ^{m}CₙₓAₙₓ^{m}CₙₓUₙₓUₙₓUₙₓGₙₓ^{m}CₙₓAₙₓAₙₓUₙₓGₙₓ^{m}CₙₓUₙₓ | 55 | 23 | 43 | 162 | 184 |
| Gₙₓ^{m}CₙₓUₙₛGₙ | | | | | |
| Uₙₛ^{m}CₙₓAₙₓ^{m}Cₙₓ^{m}Cₙₓ^{m}CₙₓUₙₓUₙₓUₙₓ^{m}Cₙₓ^{m}CₙₓAₙₓ^{m}CₙₓAₙₓGₙₓGₙₓ^{m}CₙₓGₙₓ | 69 | 23 | 43 | 178 | 200 |
| UₙₓUₙₓGₙₓ^{m}CₙₛAₙ | | | | | |
| ^{m}CₙₛUₙₓGₙₓUₙₓAₙₓGₙₓ^{m}CₙₓUₙₓUₙₓ^{m}CₙₓAₙₓ^{m}Cₙₓ^{m}Cₙₓ^{m}CₙₓUₙₓUₙₓUₙₓ^{m}Cₙₛ^{m}Cₙ | 6 | 19 | 43 | 190 | 208 |
| GₙₛGₙₓAₙₓGₙₓAₙₓGₙₓAₙₓGₙₓ^{m}CₙₓUₙₓUₙₓ^{m}Cₙₓ^{m}CₙₓUₙₓGₙₓUₙₓAₙₓGₙₓ^{m}CₙₛUₙ | 68 | 20 | 43 | 201 | 220 |
| UₙₛAₙₓUₙₓGₙₓUₙₓGₙₓUₙₓUₙₓAₙₓ^{m}Cₙₓ^{m}CₙₓUₙₓAₙₓ^{m}Cₙₓ^{m}Cₙₓ^{m}CₙₓUₙₓUₙₓGₙₓ | 67 | 25 | 43 | 263 | 287 |
| Uₙₓ^{m}CₙₓGₙₓGₙₓUₙₛ^{m}Cₙ | | | | | |

TABLE P
Modified oligonucleotides complementary to Exon 44 of
dystrophin pre-mRNA (SEQ ID NO: 221)

| | SEQ | | | Seq ID | Seq ID |
|---|---|---|---|---|---|
| | ID | | | 221 | 221 |
| Sequence | NO: | Length | Exon | Start | Stop |
| GₙₛAₙₓTₙₓ^{m}CₙₓTₙₓGₙₓTₙₓ^{m}CₙₓAₙₓAₙₓAₙₓTₙₓ^{m}CₙₓGₙₓ^{m}Cₙₓ^{m}CₙₓTₙₓGₙₓ^{m}Cₙₓ | 190 | 25 | 44 | 91 | 115 |
| AₙₓGₙₓGₙₓTₙₓAₙₛAₙ | | | | | |
| AₙₛTₙₓ^{m}CₙₓTₙₓGₙₓTₙₓ^{m}CₙₓAₙₓAₙₓAₙₓTₙₓ^{m}CₙₓGₙₓ^{m}Cₙₓ^{m}CₙₓTₙₓGₙₓ^{m}CₙₓAₙₛ | 198 | 20 | 44 | 95 | 114 |
| Gₙ | | | | | |
| Gₙₛ^{m}Cₙₓ^{m}CₙₓAₙₓUₙₓUₙₓUₙₓ^{m}CₙₓUₙₓ^{m}CₙₓAₙₓAₙₓ^{m}CₙₓAₙₓGₙₓAₙₓUₙₓ^{m}CₙₓUₙₓ | 41 | 23 | 44 | 107 | 129 |
| GₙₓUₙₓ^{m}CₙₛAₙ | | | | | |
| Gₙₛ^{m}Cₙₓ^{m}CₙₓAₙₓUₙₓUₙₓUₙₓ^{m}CₙₓUₙₓ^{m}CₙₓAₙₓAₙₓ^{m}CₙₓAₙₓGₙₓAₙₓUₙₓ^{m}CₙₛUₙ | 36 | 19 | 44 | 111 | 129 |
| ^{m}CₙₛGₙₓ^{m}Cₙₓ^{m}CₙₓGₙₓ^{m}Cₙₓ^{m}CₙₓAₙₓUₙₓUₙₓUₙₓ^{m}CₙₓUₙₓ^{m}CₙₓAₙₓAₙₓ^{m}CₙₓAₙₛ | 7 | 19 | 44 | 115 | 133 |
| Gₙ | | | | | |
| ^{m}Cₙₛ^{m}CₙₓGₙₓ^{m}Cₙₓ^{m}CₙₓAₙₓUₙₓUₙₓUₙₓ^{m}CₙₓUₙₓ^{m}CₙₓAₙₓAₙₓ^{m}CₙₓAₙₛGₙ | 9 | 17 | 44 | 115 | 131 |
| Gₙₛ^{m}Cₙₓ^{m}CₙₓGₙₓ^{m}Cₙₓ^{m}CₙₓAₙₓUₙₓUₙₓUₙₓ^{m}CₙₓUₙₓ^{m}CₙₓAₙₓAₙₓ^{m}CₙₓAₙₛGₙ | 42 | 18 | 44 | 115 | 132 |
| Gₙₛ^{m}Cₙₓ^{m}CₙₓGₙₓ^{m}Cₙₓ^{m}CₙₓAₙₓTₙₓUₙₓUₙₓ^{m}CₙₓUₙₓ^{m}CₙₓAₙₓAₙₓ^{m}CₙₓAₙₛGₙ | 93 | 18 | 44 | 115 | 132 |
| ^{m}CₙₛGₙₓ^{m}Cₙₓ^{m}CₙₓGₙₓ^{m}Cₙₓ^{m}CₙₓAₙₓTₙₓTₙₓTₙₓ^{m}CₙₓTₙₓ^{m}CₙₓAₙₓAₙₓ^{m}CₙₓAₙₛ | 197 | 19 | 44 | 115 | 133 |
| Gₙ | | | | | |
| AₙₛTₙₓAₙₓAₙₓTₙₓGₙₓAₙₓAₙₓAₙₓAₙₓ^{m}CₙₓGₙₓ^{m}Cₙₓ^{m}CₙₓGₙₓ^{m}Cₙₓ^{m}CₙₓAₙₓTₙₓ | 191 | 25 | 44 | 119 | 143 |
| TₙₓTₙₓ^{m}CₙₓTₙₓ^{m}CₙₛAₙ | | | | | |
| GₙₛAₙₓAₙₓAₙₓAₙₓ^{m}CₙₓGₙₓ^{m}Cₙₓ^{m}Cₙₓ^{m}CₙₓGₙₓ^{m}Cₙₓ^{m}CₙₓAₙₓTₙₓUₙₓUₙₓ^{m}CₙₓTₙ | 87 | 18 | 44 | 121 | 138 |
| ^{m}CₙₛAₙₓTₙₓAₙₓAₙₓTₙₓGₙₓAₙₓAₙₓAₙₓAₙₓ^{m}CₙₓGₙₓ^{m}Cₙₓ^{m}CₙₓGₙₓ^{m}Cₙₛ^{m}Cₙ | 94 | 18 | 44 | 127 | 144 |
| ^{m}CₙₛTₙₓGₙₓUₙₓTₙₓAₙₓGₙₓ^{m}Cₙₓ^{m}CₙₓAₙₓ^{m}CₙₓTₙₓGₙₓAₙₓTₙₓTₙₓAₙₛAₙ | 88 | 18 | 44 | 157 | 174 |
| TₙₛGₙₓTₙₓTₙₓ^{m}CₙₓAₙₓGₙₓ^{m}CₙₓTₙₓTₙₓ^{m}CₙₓTₙₓGₙₓTₙₓTₙₓAₙₓGₙₓ^{m}Cₙₓ^{m}CₙₓAₙₓ | 195 | 24 | 44 | 161 | 184 |
| ^{m}CₙₓTₙₓGₙₛAₙ | | | | | |
| Uₙₛ^{m}CₙₓAₙₓGₙₓ^{m}CₙₓUₙₓUₙₓ^{m}CₙₓUₙₓGₙₓUₙₓUₙₓAₙₓGₙₓ^{m}Cₙₓ^{m}CₙₓAₙₓ^{m}Cₙₓ | 37 | 20 | 44 | 162 | 181 |
| UₙₛGₙ | | | | | |
| Uₙₛ^{m}CₙₓAₙₓGₙₓ^{m}CₙₓUₙₓUₙₓ^{m}CₙₓUₙₓGₙₓUₙₓUₙₓAₙₓGₙₓ^{m}Cₙₓ^{m}CₙₓAₙₓ^{m}Cₙₓ | 37 | 20 | 44 | 162 | 181 |
| UₙₛGₙ | | | | | |
| AₙₛAₙₓAₙₓ^{m}CₙₓTₙₓGₙₓTₙₓTₙₓ^{m}CₙₓAₙₓGₙₓ^{m}CₙₓTₙₓTₙₓ^{m}CₙₓTₙₓGₙₓTₙₓTₙₓAₙₓ | 192 | 25 | 44 | 164 | 188 |
| Gₙₓ^{m}Cₙₓ^{m}CₙₓAₙₛ^{m}Cₙ | | | | | |
| GₙₛUₙₓUₙₓ^{m}CₙₓAₙₓGₙₓ^{m}CₙₓUₙₓUₙₓ^{m}CₙₓUₙₓGₙₓUₙₓUₙₓAₙₓGₙₓ^{m}Cₙₛ^{m}Cₙ | 43 | 18 | 44 | 166 | 183 |
| TₙₛGₙₓAₙₓGₙₓAₙₓAₙₓAₙₓ^{m}CₙₓTₙₓGₙₓTₙₓUₙₓ^{m}CₙₓAₙₓGₙₓ^{m}CₙₓUₙₛTₙ | 89 | 18 | 44 | 175 | 192 |
| TₙₛTₙₓGₙₓTₙₓGₙₓTₙₓ^{m}CₙₓTₙₓTₙₓTₙₓ^{m}CₙₓTₙₓGₙₓAₙₓGₙₓAₙₓAₙₓAₙₓ^{m}CₙₓTₙₓGₙₓ | 193 | 25 | 44 | 179 | 203 |
| TₙₓTₙₓ^{m}CₙₛAₙ | | | | | |
| TₙₛTₙₓTₙₓGₙₓTₙₓGₙₓTₙₓ^{m}CₙₓTₙₓTₙₓTₙₓ^{m}CₙₓTₙₓGₙₓAₙₓGₙₓAₙₓAₙₓAₙₛ^{m}Cₙ | 196 | 20 | 44 | 185 | 204 |
| AₙₛUₙₓUₙₓ^{m}CₙₓUₙₓ^{m}CₙₓAₙₓGₙₓGₙₓAₙₓAₙₓUₙₓUₙₓUₙₓGₙₓUₙₓGₙₓUₙₓ^{m}Cₙₓ | 38 | 23 | 44 | 193 | 215 |
| UₙₓUₙₓUₙₛ^{m}Cₙ | | | | | |
| Uₙₛ^{m}CₙₓUₙₓ^{m}CₙₓAₙₓGₙₓGₙₓAₙₓAₙₓUₙₓUₙₓUₙₓGₙₓUₙₓGₙₓUₙₓ^{m}CₙₓUₙₓUₙₓ | 40 | 21 | 44 | 193 | 213 |
| Uₙₛ^{m}Cₙ | | | | | |
| ^{m}CₙₛAₙₓGₙₓGₙₓAₙₓAₙₓTₙₓTₙₓUₙₓGₙₓTₙₓGₙₓUₙₓ^{m}CₙₓUₙₓUₙₓTₙₛ^{m}Cₙ | 90 | 18 | 44 | 193 | 210 |
| UₙₛUₙₓ^{m}CₙₓUₙₓ^{m}CₙₓAₙₓGₙₓGₙₓAₙₓAₙₓUₙₓUₙₓUₙₓGₙₓUₙₓGₙₓUₙₓ^{m}CₙₓUₙₓ | 10 | 21 | 44 | 194 | 214 |
| UₙₛUₙ | | | | | |
| ^{m}Cₙₛ^{m}CₙₓAₙₓAₙₓTₙₓTₙₓ^{m}CₙₓTₙₓ^{m}CₙₓAₙₓGₙₓGₙₓAₙₓAₙₓTₙₓTₙₓTₙₓGₙₓTₙₓGₙₓ | 194 | 25 | 44 | 194 | 218 |
| Tₙₓ^{m}CₙₓTₙₓTₙₛTₙ | | | | | |
| TₙₛUₙₓ^{m}Cₙₓ^{m}Cₙₓ^{m}CₙₓAₙₓAₙₓTₙₓUₙₓ^{m}CₙₓTₙₓ^{m}CₙₓAₙₓGₙₓGₙₓAₙₓAₙₛTₙ | 95 | 18 | 44 | 204 | 221 |
| AₙₛGₙₓ^{m}CₙₓAₙₓTₙₓGₙₓTₙₓTₙₓ^{m}Cₙₓ^{m}Cₙₓ^{m}CₙₓAₙₓAₙₓTₙₓUₙₓ^{m}CₙₓTₙₛ^{m}Cₙ | 92 | 18 | 44 | 210 | 227 |
| GₙₛTₙₓAₙₓUₙₓTₙₓTₙₓAₙₓGₙₓ^{m}CₙₓAₙₓTₙₓGₙₓUₙₓTₙₓ^{m}Cₙₓ^{m}Cₙₓ^{m}CₙₛAₙ | 91 | 18 | 44 | 216 | 233 |
| UₙₛUₙₓUₙₓGₙₓUₙₓAₙₓUₙₓUₙₓUₙₓAₙₓGₙₓ^{m}CₙₓAₙₓUₙₓGₙₓUₙₓUₙₓ^{m}Cₙₓ^{m}Cₙₛ^{m}Cₙ | 8 | 20 | 44 | 217 | 236 |
| UₙₛUₙₓUₙₓGₙₓUₙₓAₙₓUₙₓUₙₓUₙₓAₙₓGₙₓ^{m}CₙₓAₙₓUₙₓGₙₓUₙₓUₙₓ^{m}Cₙₓ^{m}Cₙₛ^{m}Cₙ | 8 | 20 | 44 | 217 | 236 |
| ^{m}Cₙₛ^{m}CₙₓAₙₓUₙₓUₙₓUₙₓGₙₓUₙₓAₙₓUₙₓUₙₓUₙₓAₙₓGₙₓ^{m}CₙₓAₙₓUₙₓGₙₓUₙₓ | 39 | 23 | 44 | 217 | 239 |
| Uₙₓ^{m}Cₙₓ^{m}Cₙₛ^{m}Cₙ | | | | | |
| ^{m}Cₙₛ^{m}CₙₓAₙₓUₙₓTₙₓUₙₓGₙₓTₙₓAₙₓUₙₓTₙₓTₙₓAₙₓGₙₓ^{m}CₙₓAₙₓTₙₛGₙ | 96 | 18 | 44 | 222 | 239 |

TABLE Q
Modified oligonucleotides complementary to Exon 45 of
dystrophin pre-mRNA (SEQ ID NO: 222)

| | SEQ | | | Seq ID | Seq ID |
|---|---|---|---|---|---|
| | ID | | | 222 | 222 |
| Sequence | NO: | Length | Exon | Start | Stop |
| Gₙₛ^{m}Cₙₓ^{m}CₙₓAₙₓTₙₓ^{m}Cₙₓ^{m}CₙₓTₙₓGₙₓGₙₓAₙₓGₙₓTₙₓTₙₓ^{m}Cₙₓ^{m}CₙₓTₙₓGₙₓTₙₓAₙₓ | 199 | 25 | 45 | 91 | 115 |
| AₙₓGₙₓAₙₓTₙₛAₙ | | | | | |
| ^{m}Cₙₛ^{m}CₙₓAₙₓAₙₓTₙₓGₙₓ^{m}Cₙₓ^{m}CₙₓAₙₓTₙₓ^{m}Cₙₓ^{m}CₙₓTₙₓGₙₓGₙₓAₙₓGₙₓTₙₓTₙₓ^{m}Cₙₓ | 207 | 26 | 45 | 95 | 120 |
| ^{m}CₙₓTₙₓGₙₓTₙₓAₙₛAₙ | | | | | |
| ^{m}Cₙₛ^{m}CₙₓAₙₓAₙₓTₙₓGₙₓ^{m}Cₙₓ^{m}CₙₓAₙₓTₙₓ^{m}Cₙₓ^{m}CₙₓTₙₓGₙₓGₙₓAₙₓGₙₓTₙₓTₙₓ^{m}Cₙₓ | 200 | 25 | 45 | 96 | 120 |
| ^{m}CₙₓTₙₓGₙₓTₙₛAₙ | | | | | |
| Gₙₛ^{m}Cₙₓ^{m}Cₙₓ^{m}CₙₓAₙₓAₙₓTₙₓGₙₓ^{m}Cₙₓ^{m}CₙₓAₙₓTₙₓ^{m}Cₙₓ^{m}CₙₓTₙₓGₙₛGₙ | 206 | 17 | 45 | 106 | 122 |
| UₙₛUₙₓUₙₓGₙₓ^{m}Cₙₓ^{m}CₙₓGₙₓ^{m}CₙₓUₙₓGₙₓ^{m}Cₙₓ^{m}Cₙₓ^{m}CₙₓAₙₓAₙₓUₙₓGₙₓ^{m}Cₙₓ^{m}Cₙₓ | 45 | 25 | 45 | 107 | 131 |
| AₙₓUₙₓ^{m}Cₙₓ^{m}CₙₓUₙₛGₙ | | | | | |
| UₙₛUₙₓUₙₓGₙₓ^{m}Cₙₓ^{m}CₙₓI^{m}CₙₓUₙₓGₙₓ^{m}Cₙₓ^{m}Cₙₓ^{m}CₙₓAₙₓAₙₓUₙₓGₙₓ^{m}Cₙₓ^{m}Cₙₓ | 53 | 25 | 45 | 107 | 131 |
| AₙₓUₙₓ^{m}Cₙₓ^{m}CₙₓUₙₛGₙ | | | | | |
| ^{m}CₙₛGₙₓ^{m}CₙₓTₙₓGₙₓ^{m}Cₙₓ^{m}Cₙₓ^{m}CₙₓAₙₓAₙₓTₙₓGₙₓ^{m}Cₙₓ^{m}CₙₓAₙₓTₙₓ^{m}Cₙₛ^{m}Cₙ | 82 | 18 | 45 | 109 | 126 |
| Gₙₛ^{m}Cₙₓ^{m}CₙₓGₙₓ^{m}CₙₓTₙₓGₙₓ^{m}Cₙₓ^{m}Cₙₓ^{m}CₙₓAₙₓAₙₓTₙₓGₙₛ^{m}Cₙ | 81 | 15 | 45 | 114 | 128 |
| ^{m}CₙₛAₙₓGₙₓTₙₓTₙₓTₙₓGₙₓ^{m}Cₙₓ^{m}CₙₓGₙₓ^{m}CₙₓTₙₓGₙₓ^{m}Cₙₓ^{m}Cₙₓ^{m}CₙₓAₙₛAₙ | 83 | 18 | 45 | 117 | 134 |
| ^{m}CₙₛTₙₓGₙₓAₙₓ^{m}CₙₓAₙₓAₙₓ^{m}CₙₓAₙₓGₙₓTₙₓTₙₓTₙₓGₙₓ^{m}Cₙₓ^{m}CₙₓGₙₓ^{m}CₙₓTₙₓGₙₓ | 201 | 25 | 45 | 117 | 141 |
| ^{m}Cₙₓ^{m}Cₙₓ^{m}CₙₓAₙₛAₙ | | | | | |
| AₙₛUₙₓUₙₓ^{m}CₙₓAₙₓAₙₓUₙₓGₙₓUₙₓUₙₓ^{m}CₙₓUₙₓGₙₓAₙₓ^{m}CₙₓAₙₓAₙₓ^{m}CₙₓAₙₓGₙₓ | 48 | 25 | 45 | 127 | 151 |
| UₙₓUₙₓUₙₓGₙₛ^{m}Cₙ | | | | | |
| TₙₛGₙₓTₙₓTₙₓ^{m}CₙₓTₙₓGₙₓAₙₓ^{m}CₙₓAₙₓAₙₓ^{m}CₙₓAₙₓGₙₓTₙₓTₙₓTₙₛGₙ | 84 | 18 | 45 | 128 | 145 |
| ^{m}Cₙₛ^{m}CₙₓAₙₓGₙₓUₙₓUₙₓGₙₓ^{m}CₙₓAₙₓUₙₓUₙₓ^{m}CₙₓAₙₓAₙₓUₙₓGₙₓUₙₓUₙₓ^{m}CₙₓUₙₓ | 49 | 25 | 45 | 135 | 159 |
| GₙₓAₙₓ^{m}CₙₓAₙₛAₙ | | | | | |
| GₙₛUₙₓUₙₓGₙₓ^{m}CₙₓAₙₓUₙₓUₙₓ^{m}CₙₓAₙₓAₙₓUₙₓGₙₓUₙₓUₙₓ^{m}CₙₓUₙₓGₙₓAₙₛ^{m}Cₙ | 11 | 20 | 45 | 137 | 156 |
| ^{m}CₙₛAₙₓGₙₓUₙₓUₙₓGₙₓ^{m}CₙₓAₙₓUₙₓUₙₓ^{m}CₙₓAₙₓAₙₓUₙₓGₙₓUₙₓUₙₓ^{m}CₙₓUₙₓGₙₓ | 50 | 22 | 45 | 137 | 158 |
| Aₙₛ^{m}Cₙ | | | | | |
| AₙₛGₙₓUₙₓUₙₓGₙₓ^{m}CₙₓAₙₓUₙₓUₙₓ^{m}CₙₓAₙₓAₙₓUₙₓGₙₓUₙₓUₙₓ^{m}CₙₓUₙₓGₙₛAₙ | 51 | 20 | 45 | 138 | 157 |
| Gₙₛ^{m}CₙₓTₙₓGₙₓAₙₓAₙₓTₙₓTₙₓAₙₓTₙₓTₙₓTₙₓ^{m}CₙₓTₙₓTₙₓ^{m}Cₙₓ^{m}Cₙₓ^{m}Cₙₛ^{m}Cₙ | 205 | 19 | 45 | 158 | 176 |
| GₙₛAₙₓUₙₓUₙₓGₙₓ^{m}CₙₓUₙₓGₙₓAₙₓAₙₓUₙₓUₙₓAₙₓUₙₓUₙₓUₙₓ^{m}CₙₓUₙₓUₙₓ^{m}Cₙₛ | 52 | 21 | 45 | 160 | 180 |
| ^{m}Cₙ | | | | | |
| TₙₛTₙₓTₙₓGₙₓAₙₓGₙₓGₙₓAₙₓTₙₓTₙₓGₙₓ^{m}CₙₓTₙₓGₙₓAₙₓAₙₓTₙₓTₙₓAₙₓTₙₓTₙₓTₙₓ | 202 | 25 | 45 | 162 | 186 |
| ^{m}CₙₓTₙₛTₙ | | | | | |
| TₙₛGₙₓTₙₓTₙₓTₙₓTₙₓTₙₓGₙₓAₙₓGₙₓGₙₓAₙₓTₙₓTₙₓGₙₓ^{m}CₙₓTₙₓGₙₓAₙₛAₙ | 204 | 20 | 45 | 171 | 190 |
| GₙₛAₙₓ^{m}CₙₓAₙₓGₙₓ^{m}CₙₓTₙₓGₙₓTₙₓTₙₓTₙₓGₙₓ^{m}CₙₓAₙₓGₙₓAₙₓ^{m}Cₙₓ^{m}CₙₓTₙₓ^{m}Cₙₓ | 203 | 25 | 45 | 237 | 261 |
| ^{m}CₙₓTₙₓGₙₓ^{m}Cₙₛ^{m}Cₙ | | | | | |

TABLE R
Modified oligonucleotides complementary to Exon 46 of dystrophin pre-mRNA (SEQ ID NO: 223)

| | SEQ ID | | | Seq ID | Seq ID |
|---|---|---|---|---|---|
| Sequence | NO: | Length | Exon | 223 Start | 223 Stop |
| ^{m}CₙₛTₙₓGₙₓ^{m}CₙₓTₙₓTₙₓ^{m}Cₙₓ^{m}CₙₓTₙₓ^{m}Cₙₓ^{m}CₙₓAₙₓAₙₓ^{m}Cₙₛ^{m}Cₙ | 21 | 15 | 46 | 163 | 177 |
| GₙₛTₙₓTₙₓAₙₓTₙₓ^{m}CₙₓTₙₓGₙₓ^{m}CₙₓTₙₓTₙₓ^{m}Cₙₓ^{m}CₙₓTₙₓ^{m}Cₙₓ^{m}CₙₓAₙₓAₙₓ^{m}Cₙₛ | 22 | 20 | 46 | 163 | 182 |
| ^{m}Cₙ | | | | | |
| ^{m}CₙₛTₙₓGₙₓ^{m}CₙₓTₙₓTₙₓ^{m}Cₙₓ^{m}CₙₓTₙₓ^{m}Cₙₓ^{m}CₙₓAₙₓAₙₓ^{m}Cₙₛ^{m}Cₙ | 21 | 15 | 46 | 163 | 177 |
| GₙₛTₙₓTₙₓAₙₓTₙₓ^{m}CₙₓTₙₓGₙₓ^{m}CₙₓTₙₓTₙₓ^{m}Cₙₓ^{m}CₙₓTₙₓ^{m}Cₙₓ^{m}CₙₓAₙₓAₙₓ^{m}Cₙₛ | 22 | 20 | 46 | 163 | 182 |
| ^{m}Cₙ | | | | | |
| AₙₛGₙₓ^{m}CₙₓAₙₓAₙₓUₙₓGₙₓUₙₓUₙₓAₙₓUₙₓ^{m}CₙₓUₙₓGₙₓ^{m}CₙₓUₙₓUₙₓ^{m}Cₙₓ^{m}Cₙₓ | 56 | 25 | 46 | 164 | 188 |
| Uₙₓ^{m}Cₙₓ^{m}CₙₓAₙₓAₙₛ^{m}Cₙ | | | | | |
| GₙₛGₙₓAₙₓUₙₓAₙₓ^{m}CₙₓUₙₓAₙₓGₙₓ^{m}CₙₓAₙₓAₙₓUₙₓGₙₓUₙₓUₙₓAₙₓUₙₓ^{m}Cₙₓ | 59 | 25 | 46 | 171 | 195 |
| UₙₓGₙₓ^{m}CₙₓUₙₓUₙₛ^{m}Cₙ | | | | | |
| ^{m}CₙₛUₙₓ^{m}CₙₓUₙₓUₙₓUₙₓUₙₓ^{m}Cₙₓ^{m}CₙₓAₙₓGₙₓGₙₓUₙₓUₙₓ^{m}CₙₓAₙₓAₙₓGₙₓ | 70 | 30 | 46 | 186 | 215 |
| UₙₓGₙₓGₙₓGₙₓAₙₓUₙₓAₙₓ^{m}CₙₓUₙₓAₙₓGₙₛ^{m}Cₙ | | | | | |
| AₙₛGₙₓGₙₓUₙₓUₙₓ^{m}CₙₓAₙₓAₙₓGₙₓUₙₓGₙₓGₙₓGₙₓAₙₓUₙₓAₙₓ^{m}CₙₓUₙₛAₙ | 15 | 19 | 46 | 188 | 206 |
| Uₙₛ^{m}Cₙₓ^{m}CₙₓAₙₓGₙₓGₙₓUₙₓUₙₓ^{m}CₙₓAₙₓAₙₓGₙₓUₙₓGₙₓGₙₓGₙₓAₙₓUₙₓAₙₛ | 13 | 20 | 46 | 190 | 209 |
| ^{m}Cₙ | | | | | |
| Uₙₛ^{m}CₙₓUₙₓUₙₓUₙₓUₙₓ^{m}Cₙₓ^{m}CₙₓAₙₓGₙₓGₙₓUₙₓUₙₓ^{m}CₙₓAₙₓAₙₓGₙₓUₙₓ | 57 | 20 | 46 | 195 | 214 |
| GₙₛGₙ | | | | | |
| TₙₛTₙₓTₙₓTₙₓ^{m}Cₙₓ^{m}CₙₓAₙₓGₙₓGₙₓTₙₓTₙₓ^{m}CₙₓAₙₓAₙₓGₙₓTₙₓGₙₛGₙ | 86 | 18 | 46 | 195 | 212 |
| UₙₛUₙₓ^{m}Cₙₓ^{m}CₙₓAₙₓGₙₓGₙₓUₙₓUₙₓ^{m}CₙₓAₙₓAₙₓGₙₓUₙₛGₙ | 14 | 15 | 46 | 196 | 210 |
| TₙₛTₙₓGₙₓ^{m}CₙₓTₙₓGₙₓ^{m}CₙₓTₙₓ^{m}CₙₓTₙₓTₙₓTₙₓTₙₓ^{m}Cₙₛ^{m}Cₙ | 25 | 15 | 46 | 207 | 221 |
| ^{m}CₙₛAₙₓAₙₓGₙₓ^{m}CₙₓUₙₓUₙₓUₙₓUₙₓ^{m}CₙₓUₙₓUₙₓUₙₓUₙₓAₙₓGₙₓUₙₓUₙₓGₙₓ | 71 | 31 | 46 | 207 | 237 |
| ^{m}CₙₓUₙₓGₙₓ^{m}CₙₓUₙₓ^{m}CₙₓUₙₓUₙₓUₙₓUₙₓ^{m}Cₙₓ^{m}Cₙ | | | | | |
| ^{m}CₙₛTₙₓTₙₓTₙₓTₙₓAₙₓGₙₓTₙₓTₙₓGₙₓ^{m}CₙₓTₙₓGₙₓ^{m}CₙₓTₙₓ^{m}CₙₓTₙₓTₙₓTₙₓTₙₓ | 85 | 22 | 46 | 207 | 228 |
| ^{m}Cₙₛ^{m}Cₙ | | | | | |
| Gₙₛ^{m}CₙₓUₙₓUₙₓUₙₓUₙₓ^{m}CₙₓUₙₓUₙₓUₙₓUₙₓAₙₓGₙₓUₙₓUₙₓGₙₓ^{m}CₙₓUₙₓGₙₓ | 58 | 25 | 46 | 210 | 234 |
| ^{m}CₙₓUₙₓ^{m}CₙₓUₙₓUₙₛUₙ | | | | | |
| TₙₛTₙₓAₙₓGₙₓTₙₓTₙₓGₙₓ^{m}CₙₓTₙₓGₙₓ^{m}CₙₓTₙₓ^{m}CₙₓTₙₛTₙ | 24 | 15 | 46 | 211 | 225 |
| Gₙₛ^{m}CₙₓUₙₓUₙₓUₙₓUₙₓ^{m}CₙₓUₙₓUₙₓUₙₓUₙₓAₙₓGₙₓUₙₓUₙₓGₙₓ^{m}CₙₓUₙₓGₙₛ | 12 | 20 | 46 | 215 | 234 |
| ^{m}Cₙ | | | | | |
| Gₙₛ^{m}CₙₓTₙₓTₙₓTₙₓTₙₓ^{m}CₙₓTₙₓTₙₓTₙₓTₙₓAₙₓGₙₓTₙₓTₙₓGₙₓ^{m}CₙₓTₙₓGₙₛ^{m}Cₙ | 23 | 20 | 46 | 215 | 234 |

TABLE S
Modified oligonucleotides complementary to Exon 50 of dystrophin pre-mRNA (SEQ ID NO: 224)

| | | | | Seq ID | Seq ID |
|---|---|---|---|---|---|
| | SEQ ID | | | 224 | 224 |
| Sequence | NO: | Length | Exon | Start | Stop |
| ^{m}CₙₛAₙₓGₙₓAₙₓGₙₓ^{m}CₙₓTₙₓ^{m}CₙₓAₙₓGₙₓAₙₓTₙₓ^{m}CₙₓTₙₓTₙₓ^{m}CₙₓTₙₓAₙₓAₙₓ^{m}CₙₓTₙₓ | 177 | 25 | 50 | 101 | 125 |
| Tₙₓ^{m}Cₙₓ^{m}CₙₛTₙ | | | | | |
| ^{m}Cₙₛ^{m}CₙₓAₙₓ^{m}CₙₓUₙₓ^{m}CₙₓAₙₓGₙₓAₙₓGₙₓ^{m}CₙₓUₙₓ^{m}CₙₓAₙₓGₙₓAₙₓUₙₓ^{m}CₙₓUₙₓUₙₓ | 72 | 29 | 50 | 102 | 130 |
| ^{m}CₙₓUₙₓAₙₓAₙₓ^{m}CₙₓUₙₓUₙₓ^{m}Cₙₛ^{m}Cₙ | | | | | |
| ^{m}Cₙₛ^{m}CₙₓAₙₓ^{m}CₙₓTₙₓ^{m}CₙₓAₙₓGₙₓAₙₓGₙₓ^{m}CₙₓTₙₓ^{m}CₙₓAₙₓGₙₓAₙₓTₙₓ^{m}CₙₓTₙₓTₙₓ^{m}Cₙₓ | 181 | 29 | 50 | 102 | 130 |
| TₙₓAₙₓAₙₓ^{m}CₙₓTₙₓTₙₓ^{m}Cₙₛ^{m}Cₙ | | | | | |
| ^{m}CₙₛTₙₓ^{m}CₙₓAₙₓGₙₓAₙₓTₙₓ^{m}CₙₓUₙₓUₙₓ^{m}CₙₓTₙₓAₙₓAₙₓ^{m}CₙₓUₙₓUₙₛ^{m}Cₙ | 97 | 18 | 50 | 103 | 120 |
| ^{m}CₙₛUₙₓUₙₓ^{m}Cₙₓ^{m}CₙₓAₙₓ^{m}CₙₓUₙₓ^{m}CₙₓAₙₓGₙₓAₙₓGₙₓ^{m}CₙₓUₙₓ^{m}CₙₓAₙₓGₙₓAₙₓUₙₓ | 73 | 27 | 50 | 107 | 133 |
| ^{m}CₙₓUₙₓUₙₓ^{m}CₙₓUₙₓAₙₛAₙ | | | | | |
| ^{m}CₙₛTₙₓTₙₓ^{m}Cₙₓ^{m}CₙₓAₙₓ^{m}CₙₓTₙₓ^{m}CₙₓAₙₓGₙₓAₙₓGₙₓ^{m}CₙₓTₙₓ^{m}CₙₓAₙₓGₙₓAₙₓTₙₓ^{m}Cₙₓ | 183 | 27 | 50 | 107 | 133 |
| TₙₓTₙₓ^{m}CₙₓTₙₓAₙₛAₙ | | | | | |
| ^{m}CₙₛUₙₓ^{m}CₙₓAₙₓGₙₓAₙₓGₙₓ^{m}CₙₓUₙₓ^{m}CₙₓAₙₓGₙₓAₙₓUₙₓ^{m}CₙₓUₙₛUₙ | 16 | 17 | 50 | 111 | 127 |
| Aₙₛ^{m}Cₙₓ^{m}CₙₓGₙₓ^{m}Cₙₓ^{m}CₙₓTₙₓUₙₓ^{m}Cₙₓ^{m}CₙₓAₙₓ^{m}CₙₓTₙₓ^{m}CₙₓAₙₓGₙₓAₙₛGₙ | 98 | 18 | 50 | 121 | 138 |
| Tₙₛ^{m}CₙₓTₙₓTₙₓGₙₓAₙₓAₙₓGₙₓTₙₓAₙₓAₙₓAₙₓ^{m}CₙₓGₙₓGₙₓTₙₓUₙₛTₙ | 99 | 18 | 50 | 139 | 156 |
| GₙₛGₙₓ^{m}CₙₓTₙₓGₙₓ^{m}CₙₓTₙₓTₙₓUₙₓGₙₓ^{m}Cₙₓ^{m}Cₙₓ^{m}CₙₓTₙₓ^{m}CₙₓAₙₓGₙₛ^{m}Cₙ | 100 | 18 | 50 | 157 | 174 |
| Gₙₛ^{m}CₙₓTₙₓAₙₓGₙₓGₙₓTₙₓ^{m}CₙₓAₙₓGₙₓGₙₓ^{m}CₙₓTₙₓGₙₓ^{m}CₙₓTₙₓTₙₛUₙ | 103 | 18 | 50 | 166 | 183 |
| AₙₛGₙₓTₙₓ^{m}Cₙₓ^{m}CₙₓAₙₓGₙₓGₙₓAₙₓGₙₓ^{m}CₙₓTₙₓAₙₓGₙₓGₙₓTₙₓ^{m}CₙₛAₙ | 101 | 18 | 50 | 175 | 192 |
| AₙₛUₙₓAₙₓGₙₓUₙₓGₙₓGₙₓUₙₓ^{m}CₙₓAₙₓGₙₓUₙₓ^{m}Cₙₓ^{m}CₙₓAₙₓGₙₓGₙₓAₙₓGₙₓ^{m}CₙₛUₙ | 60 | 21 | 50 | 181 | 201 |
| Gₙₛ^{m}CₙₓTₙₓ^{m}Cₙₓ^{m}CₙₓAₙₓAₙₓTₙₓAₙₓGₙₓTₙₓGₙₓGₙₓTₙₓ^{m}CₙₓAₙₓGₙₛTₙ | 102 | 18 | 50 | 190 | 207 |
| ^{m}CₙₛTₙₓTₙₓAₙₓ^{m}CₙₓAₙₓGₙₓGₙₓ^{m}CₙₓTₙₓ^{m}Cₙₓ^{m}CₙₓAₙₓAₙₓTₙₓAₙₓGₙₓTₙₓGₙₓGₙₓTₙₓ^{m}Cₙₓ | 178 | 25 | 50 | 190 | 214 |
| AₙₓGₙₛTₙ | | | | | |
| GₙₛGₙₓGₙₓAₙₓUₙₓ^{m}Cₙₓ^{m}CₙₓAₙₓGₙₓUₙₓAₙₓUₙₓAₙₓ^{m}CₙₓUₙₓUₙₓAₙₓ^{m}CₙₓAₙₓGₙₓGₙₓ | 74 | 25 | 50 | 203 | 227 |
| ^{m}CₙₓUₙₓ^{m}Cₙₛ^{m}Cₙ | | | | | |
| GₙₛGₙₓGₙₓAₙₓTₙₓ^{m}Cₙₓ^{m}CₙₓAₙₓGₙₓTₙₓAₙₓTₙₓAₙₓ^{m}CₙₓTₙₓTₙₓAₙₓ^{m}CₙₓAₙₓGₙₓGₙₓ^{m}Cₙₓ | 182 | 25 | 50 | 203 | 227 |
| Tₙₓ^{m}Cₙₛ^{m}Cₙ | | | | | |
| AₙₛTₙₓGₙₓGₙₓGₙₓAₙₓTₙₓ^{m}Cₙₓ^{m}CₙₓAₙₓGₙₓTₙₓAₙₓTₙₓAₙₓ^{m}CₙₓTₙₓTₙₓAₙₓ^{m}CₙₓAₙₓGₙₓ | 179 | 25 | 50 | 205 | 229 |
| Gₙₓ^{m}CₙₛTₙ | | | | | |
| AₙₛGₙₓAₙₓGₙₓAₙₓAₙₓTₙₓGₙₓGₙₓGₙₓAₙₓTₙₓ^{m}Cₙₓ^{m}CₙₓAₙₓGₙₓTₙₓAₙₓTₙₓAₙₓ^{m}CₙₓTₙₓ | 180 | 25 | 50 | 210 | 234 |
| TₙₓAₙₛ^{m}Cₙ | | | | | |

TABLE T
Modified oligonucleotides complementary to Exon 51 of dystrophin pre-mRNA (SEQ ID NO: 225)

| | SEQ | | | Seq | |
|---|---|---|---|---|---|
| | ID | | | ID 225 | Seq ID |
| Sequence | NO: | Length | Exon | Start | 225 Stop |
| TₙₛAₙₓAₙₓ^{m}CₙₓAₙₓGₙₓUₙₓ^{m}CₙₓUₙₓGₙₓAₙₓGₙₓUₙₓAₙₓGₙₓGₙₓAₙₛGₙ | 111 | 18 | 51 | 101 | 118 |
| TₙₛGₙₓTₙₓGₙₓTₙₓ^{m}CₙₓAₙₓ^{m}Cₙₓ^{m}CₙₓAₙₓGₙₓAₙₓGₙₓUₙₓAₙₓAₙₓ^{m}CₙₓAₙₓGₙₛ | 104 | 20 | 51 | 112 | 131 |
| Tₙ | | | | | |
| AₙₛGₙₓGₙₓTₙₓTₙₓGₙₓUₙₓGₙₓUₙₓ^{m}CₙₓAₙₓ^{m}Cₙₓ^{m}CₙₓAₙₓGₙₓAₙₓGₙₓTₙₓAₙₛ | 105 | 20 | 51 | 116 | 135 |
| Aₙ | | | | | |
| ^{m}Cₙₛ^{m}CₙₓAₙₓ^{m}CₙₓAₙₓGₙₓGₙₓTₙₓTₙₓGₙₓTₙₓGₙₓTₙₓ^{m}CₙₓAₙₓ^{m}Cₙₓ^{m}CₙₓAₙₛ | 26 | 19 | 51 | 121 | 139 |
| Gₙ | | | | | |
| AₙₛGₙₓTₙₓAₙₓAₙₓ^{m}Cₙₓ^{m}CₙₓAₙₓ^{m}CₙₓAₙₓGₙₓGₙₓUₙₓUₙₓGₙₓTₙₓGₙₓTₙₓ^{m}Cₙₛ | 106 | 20 | 51 | 125 | 144 |
| Aₙ | | | | | |
| TₙₛTₙₓTₙₓ^{m}Cₙₓ^{m}CₙₓTₙₓTₙₓAₙₓGₙₓTₙₓAₙₓAₙₓ^{m}Cₙₓ^{m}CₙₓAₙₓ^{m}CₙₓAₙₓGₙₓGₙₓ | 27 | 21 | 51 | 131 | 151 |
| TₙₛTₙ | | | | | |
| AₙₛTₙₓTₙₓTₙₓ^{m}CₙₓTₙₓAₙₓGₙₓTₙₓTₙₓTₙₓGₙₓGₙₓAₙₓGₙₓAₙₓTₙₓGₙₓGₙₓ^{m}Cₙₓ | 170 | 26 | 51 | 148 | 173 |
| AₙₓGₙₓTₙₓTₙₓTₙₛ^{m}Cₙ | | | | | |
| AₙₛGₙₓTₙₓTₙₓTₙₓGₙₓGₙₓAₙₓGₙₓAₙₓUₙₓGₙₓGₙₓ^{m}CₙₓAₙₓGₙₓTₙₛTₙ | 114 | 18 | 51 | 150 | 167 |
| GₙₛGₙₓ^{m}CₙₓAₙₓTₙₓUₙₓUₙₓ^{m}CₙₓUₙₓAₙₓGₙₓUₙₓUₙₓTₙₓGₙₓGₙₓAₙₛGₙ | 112 | 18 | 51 | 159 | 176 |
| TₙₛGₙₓGₙₓ^{m}CₙₓAₙₓTₙₓTₙₓTₙₓ^{m}CₙₓTₙₓAₙₓGₙₓTₙₓTₙₓTₙₓGₙₛGₙ | 28 | 17 | 51 | 161 | 177 |
| Aₙₛ^{m}CₙₓAₙₓUₙₓ^{m}CₙₓAₙₓAₙₓGₙₓGₙₓAₙₓAₙₓGₙₓAₙₓUₙₓGₙₓGₙₓ^{m}CₙₓAₙₓUₙₓ | 75 | 30 | 51 | 161 | 190 |
| UₙₓUₙₓ^{m}CₙₓUₙₓAₙₓGₙₓUₙₓUₙₓUₙₓGₙₛGₙ | | | | | |
| Aₙₛ^{m}CₙₓAₙₓTₙₓ^{m}CₙₓAₙₓAₙₓGₙₓGₙₓAₙₓAₙₓGₙₓAₙₓTₙₓGₙₓGₙₓ^{m}CₙₓAₙₓTₙₓ | 173 | 30 | 51 | 161 | 190 |
| TₙₓTₙₓ^{m}CₙₓTₙₓAₙₓGₙₓTₙₓTₙₓTₙₓGₙₛGₙ | | | | | |
| TₙₛGₙₓGₙₓ^{m}CₙₓAₙₓTₙₓTₙₓTₙₓ^{m}CₙₓTₙₓAₙₓGₙₓTₙₓTₙₓTₙₓGₙₛGₙ | 28 | 17 | 51 | 161 | 177 |
| Uₙₛ^{m}CₙₓAₙₓAₙₓGₙₓGₙₓAₙₓAₙₓGₙₓAₙₓUₙₓGₙₓGₙₓ^{m}CₙₓAₙₓUₙₓUₙₓUₙₓ^{m}Cₙₓ | 61 | 25 | 51 | 163 | 187 |
| UₙₓAₙₓGₙₓUₙₓUₙₛUₙ | | | | | |
| ^{m}CₙₛAₙₓTₙₓ^{m}CₙₓAₙₓAₙₓGₙₓGₙₓAₙₓAₙₓGₙₓAₙₓTₙₓGₙₓGₙₓ^{m}CₙₓAₙₓTₙₓTₙₓ | 171 | 26 | 51 | 164 | 189 |
| Tₙₓ^{m}CₙₓTₙₓAₙₓGₙₓTₙₛTₙ | | | | | |
| Aₙₛ^{m}CₙₓAₙₓUₙₓ^{m}CₙₓAₙₓAₙₓGₙₓGₙₓAₙₓAₙₓGₙₓAₙₓUₙₓGₙₓGₙₓ^{m}CₙₓAₙₓUₙₓ | 76 | 25 | 51 | 166 | 190 |
| UₙₓUₙₓ^{m}CₙₓUₙₓAₙₛGₙ | | | | | |
| ^{m}CₙₛUₙₓ^{m}Cₙₓ^{m}CₙₓAₙₓAₙₓ^{m}CₙₓAₙₓUₙₓ^{m}CₙₓAₙₓAₙₓGₙₓGₙₓAₙₓAₙₓGₙₓAₙₓ | 77 | 30 | 51 | 166 | 195 |
| UₙₓGₙₓGₙₓ^{m}CₙₓAₙₓUₙₓUₙₓUₙₓ^{m}CₙₓUₙₓAₙₛGₙ | | | | | |
| ^{m}CₙₛTₙₓ^{m}Cₙₓ^{m}CₙₓAₙₓAₙₓ^{m}CₙₓAₙₓTₙₓ^{m}CₙₓAₙₓAₙₓGₙₓGₙₓAₙₓAₙₓGₙₓAₙₓ | 174 | 30 | 51 | 166 | 195 |
| TₙₓGₙₓGₙₓ^{m}CₙₓAₙₓTₙₓTₙₓTₙₓ^{m}CₙₓTₙₓAₙₛGₙ | | | | | |
| Aₙₛ^{m}CₙₓAₙₓTₙₓ^{m}CₙₓAₙₓAₙₓGₙₓGₙₓAₙₓAₙₓGₙₓAₙₓTₙₓGₙₓGₙₓ^{m}CₙₓAₙₓTₙₓ | 176 | 25 | 51 | 166 | 190 |
| TₙₓTₙₓ^{m}CₙₓTₙₓAₙₛGₙ | | | | | |
| Uₙₛ^{m}CₙₓAₙₓAₙₓGₙₓGₙₓAₙₓAₙₓGₙₓAₙₓUₙₓGₙₓGₙₓ^{m}CₙₓAₙₓUₙₓUₙₓUₙₓ^{m}Cₙₛ | 17 | 20 | 51 | 168 | 187 |
| Uₙ | | | | | |
| Uₙₛ^{m}CₙₓAₙₓAₙₓGₙₓGₙₓAₙₓAₙₓGₙₓAₙₓUₙₓGₙₓGₙₓ^{m}CₙₓAₙₓUₙₓUₙₓUₙₓ^{m}Cₙₛ | 17 | 20 | 51 | 168 | 187 |
| Uₙ | | | | | |
| Tₙₛ^{m}CₙₓAₙₓAₙₓGₙₓGₙₓAₙₓAₙₓGₙₓAₙₓTₙₓGₙₓGₙₓ^{m}CₙₓAₙₓTₙₓTₙₓTₙₓ^{m}Cₙₛ | 175 | 20 | 51 | 168 | 187 |
| Tₙ | | | | | |
| GₙₛAₙₓGₙₓ^{m}CₙₓAₙₓGₙₓGₙₓTₙₓAₙₓ^{m}Cₙₓ^{m}CₙₓTₙₓ^{m}Cₙₓ^{m}CₙₓAₙₓAₙₓ^{m}CₙₓAₙₓ | 172 | 26 | 51 | 180 | 205 |
| Tₙₓ^{m}CₙₓAₙₓAₙₓGₙₓGₙₓAₙₛAₙ | | | | | |
| ^{m}Cₙₛ^{m}CₙₓAₙₓGₙₓAₙₓGₙₓ^{m}CₙₓAₙₓGₙₓGₙₓTₙₓAₙₓ^{m}Cₙₓ^{m}CₙₓTₙₓ^{m}Cₙₓ^{m}Cₙₓ | 29 | 23 | 51 | 186 | 208 |
| AₙₓAₙₓ^{m}CₙₓAₙₓTₙₛ^{m}Cₙ | | | | | |
| ^{m}Cₙₛ^{m}CₙₓAₙₓGₙₓAₙₓGₙₓ^{m}CₙₓAₙₓGₙₓGₙₓTₙₓAₙₓ^{m}Cₙₓ^{m}CₙₓTₙₓ^{m}Cₙₓ^{m}Cₙₓ | 29 | 23 | 51 | 186 | 208 |
| AₙₓAₙₓ^{m}CₙₓAₙₓTₙₛ^{m}Cₙ | | | | | |
| GₙₛGₙₓTₙₓAₙₓAₙₓGₙₓTₙₓTₙₓ^{m}CₙₓTₙₓGₙₓTₙₓ^{m}Cₙₓ^{m}CₙₓAₙₓAₙₓGₙₓ^{m}Cₙₓ^{m}Cₙₛ | 30 | 20 | 51 | 221 | 240 |
| ^{m}Cₙ | | | | | |
| AₙₛGₙₓ^{m}Cₙₓ^{m}CₙₓAₙₓGₙₓUₙₓ^{m}CₙₓGₙₓGₙₓUₙₓAₙₓAₙₓGₙₓTₙₓTₙₓ^{m}CₙₛTₙ | 113 | 18 | 51 | 231 | 248 |
| TₙₛTₙₓGₙₓAₙₓTₙₓ^{m}CₙₓAₙₓAₙₓGₙₓ^{m}CₙₓAₙₓGₙₓAₙₓGₙₓAₙₓAₙₓAₙₓGₙₓ^{m}Cₙₛ | 107 | 20 | 51 | 245 | 264 |
| ^{m}Cₙ | | | | | |
| ^{m}Cₙₛ^{m}CₙₓUₙₓ^{m}CₙₓUₙₓGₙₓUₙₓGₙₓAₙₓUₙₓUₙₓUₙₓUₙₓAₙₓUₙₓAₙₓAₙₓ^{m}Cₙₓ | 18 | 23 | 51 | 260 | 282 |
| UₙₓUₙₓGₙₓAₙₛUₙ | | | | | |
| ^{m}CₙₛAₙₓ^{m}Cₙₓ^{m}Cₙₓ^{m}CₙₓUₙₓ^{m}CₙₓUₙₓGₙₓUₙₓGₙₓAₙₓUₙₓUₙₓUₙₓTₙₓAₙₓTₙₓ | 108 | 20 | 51 | 266 | 285 |
| AₙₛAₙ | | | | | |
| Tₙₛ^{m}CₙₓAₙₓ^{m}Cₙₓ^{m}Cₙₓ^{m}CₙₓTₙₓ^{m}CₙₓTₙₓGₙₓTₙₓGₙₓAₙₓTₙₓTₙₓTₙₓTₙₓAₙₛTₙ | 31 | 19 | 51 | 268 | 286 |
| ^{m}Cₙₛ^{m}Cₙₓ^{m}CₙₓTₙₓ^{m}CₙₓTₙₓGₙₓTₙₓGₙₓAₙₓTₙₓTₙₓTₙₛTₙ | 32 | 14 | 51 | 270 | 283 |
| Aₙₛ^{m}Cₙₓ^{m}Cₙₓ^{m}CₙₓAₙₓ^{m}Cₙₓ^{m}CₙₓAₙₓUₙₓ^{m}CₙₓAₙₓ^{m}Cₙₓ^{m}Cₙₓ^{m}CₙₓUₙₓ^{m}Cₙₓ | 109 | 20 | 51 | 275 | 294 |
| TₙₓGₙₓTₙₛGₙ | | | | | |
| Tₙₛ^{m}CₙₓAₙₓ^{m}Cₙₓ^{m}Cₙₓ^{m}CₙₓAₙₓ^{m}Cₙₓ^{m}CₙₓAₙₓTₙₓ^{m}CₙₓAₙₓ^{m}Cₙₓ^{m}CₙₛTₙ | 33 | 17 | 51 | 280 | 296 |
| ^{m}Cₙₛ^{m}CₙₓTₙₓ^{m}CₙₓAₙₓAₙₓGₙₓGₙₓUₙₓ^{m}CₙₓAₙₓ^{m}Cₙₓ^{m}Cₙₓ^{m}CₙₓAₙₓ^{m}Cₙₓ^{m}Cₙₓ | 110 | 20 | 51 | 285 | 304 |
| AₙₓTₙₛ^{m}Cₙ | | | | | |
| UₙₛGₙₓAₙₓUₙₓAₙₓUₙₓ^{m}Cₙₓ^{m}CₙₓUₙₓ^{m}CₙₓAₙₓAₙₓGₙₓGₙₓUₙₓ^{m}CₙₓAₙₓ^{m}Cₙₓ | 19 | 20 | 51 | 291 | 310 |
| ^{m}Cₙₛ^{m}Cₙ | | | | | |
| TₙₛGₙₓAₙₓTₙₓAₙₓTₙₓ^{m}Cₙₓ^{m}CₙₓTₙₓ^{m}CₙₓAₙₓAₙₓGₙₓGₙₓTₙₓ^{m}CₙₓAₙₓ^{m}Cₙₓ^{m}Cₙₛ | 34 | 20 | 51 | 291 | 310 |
| ^{m}Cₙ | | | | | |
| ^{m}CₙₛTₙₓGₙₓ^{m}CₙₓTₙₓTₙₓGₙₓAₙₓTₙₓGₙₓAₙₓTₙₓ^{m}CₙₓAₙₓTₙₓ^{m}CₙₓTₙₓ^{m}CₙₓGₙₓ | 35 | 21 | 51 | 310 | 330 |
| TₙₛTₙ | | | | | |

TABLE U
Modified oligonucleotides complementary to Exon 52 of dystrophin pre-mRNA (SEQ ID NO: 226)

| | SEQ | | | | |
|---|---|---|---|---|---|
| | ID | | | Seq ID | Seq ID |
| Sequence | NO: | Length | Exon | 226 Start | 226 Stop |
| Uₙₛ^{m}Cₙₓ^{m}CₙAₙₓAₙₓ^{m}CₙₓUₙₓGₙₓGₙₓGₙₓGₙₓAₙₓ^{m}CₙₓGₙₓ^{m}Cₙₓ^{m}CₙₓUₙₓ^{m}Cₙₓ | 78 | 30 | 52 | 112 | 141 |
| UₙₓGₙₓUₙₓUₙₓ^{m}Cₙₓ^{m}CₙₓAₙₓAₙₓAₙₓUₙₓ^{m}Cₙₛ^{m}Cₙ | | | | | |
| Aₙₛ^{m}CₙₓUₙₓGₙₓGₙₓGₙₓGₙₓAₙₓ^{m}CₙₓGₙₓ^{m}Cₙₓ^{m}CₙₓUₙₓ^{m}CₙₓUₙₓGₙₓUₙₓUₙₓ | 79 | 21 | 52 | 117 | 137 |
| ^{m}Cₙₓ^{m}CₙₛAₙ | | | | | |
| UₙₛUₙₓ^{m}Cₙₓ^{m}CₙₓAₙₓAₙₓ^{m}CₙₓUₙₓGₙₓGₙₓGₙₓGₙₓAₙₓ^{m}CₙₓGₙₓ^{m}Cₙₓ^{m}CₙₓUₙₓ | 62 | 25 | 52 | 118 | 142 |
| ^{m}CₙₓUₙₓGₙₓUₙₓUₙₓ^{m}Cₙₛ^{m}Cₙ | | | | | |
| GₙₛGₙₓUₙₓAₙₓAₙₓUₙₓGₙₓAₙₓGₙₓUₙₓUₙₓ^{m}CₙₓUₙₓUₙₓ^{m}Cₙₓ^{m}CₙₓAₙₓAₙₓ^{m}Cₙₓ | 47 | 22 | 52 | 133 | 154 |
| UₙₓGₙₛGₙ | | | | | |
| ^{m}CₙₛAₙₓGₙₓ^{m}CₙₓGₙₓGₙₓTₙₓAₙₓAₙₓTₙₓGₙₓAₙₓGₙₓTₙₓTₙₓ^{m}CₙₓTₙₓTₙₓ^{m}Cₙₓ | 169 | 25 | 52 | 134 | 158 |
| ^{m}CₙₓAₙₓAₙₓ^{m}CₙₓTₙₛGₙ | | | | | |
| Gₙₛ^{m}CₙₓUₙₓGₙₓGₙₓUₙₓ^{m}CₙₓUₙₓUₙₓGₙₓUₙₓUₙₓUₙₓUₙₓUₙₓ^{m}CₙₓAₙₛAₙ | 20 | 18 | 52 | 167 | 184 |
| ^{m}CₙₛUₙₓ^{m}CₙₓUₙₓUₙₓGₙₓAₙₓUₙₓUₙₓGₙₓ^{m}CₙₓUₙₓGₙₓGₙₓUₙₓ^{m}CₙₓUₙₓUₙₓ | 46 | 25 | 52 | 169 | 193 |
| GₙₓUₙₓUₙₓUₙₓUₙₓUₙₛ^{m}Cₙ | | | | | |
| ^{m}CₙₛUₙₓ^{m}CₙₓUₙₓUₙₓGₙₓAₙₓUₙₓUₙₓGₙₓ^{m}CₙₓUₙₓGₙₓGₙₓUₙₓ^{m}CₙₓUₙₓUₙₓ | 46 | 25 | 52 | 169 | 193 |
| GₙₓUₙₓUₙₓUₙₓUₙₓUₙₛ^{m}Cₙ | | | | | |

TABLE V
Modified oligonucleotides complementary to Exon 53 of dystrophin pre-mRNA (SEQ ID NO: 227)

| | | | | Seq | |
|---|---|---|---|---|---|
| | SEQ | | | ID | Seq ID |
| | ID | | | 227 | 227 |
| Sequence | NO: | Length | Exon | Start | Stop |
| AₙₛTₙₓTₙₓ^{m}CₙₓTₙₓTₙₓTₙₓ^{m}CₙₓAₙₓAₙₓ^{m}CₙₓTₙₓAₙₓGₙₓAₙₓAₙₓTₙₓAₙₓAₙₓAₙₓAₙₛGₙ | 189 | 22 | 53 | 89 | 110 |
| ^{m}CₙₛTₙₓGₙₓAₙₓTₙₓTₙₓ^{m}CₙₓTₙₓGₙₓAₙₓAₙₓTₙₓTₙₓ^{m}CₙₓUₙₓUₙₓTₙₛ^{m}Cₙ | 115 | 18 | 53 | 103 | 120 |
| TₙₛAₙₓ^{m}CₙₓTₙₓTₙₓ^{m}CₙₓAₙₓTₙₓ^{m}Cₙₓ^{m}Cₙₓ^{m}CₙₓAₙₓ^{m}CₙₓTₙₓGₙₓAₙₓTₙₓTₙₓ^{m}CₙₓTₙₓGₙₓAₙₓ | 184 | 25 | 53 | 108 | 132 |
| AₙₓTₙₛTₙ | | | | | |
| UₙₛUₙₓGₙₓUₙₓAₙₓ^{m}CₙₓUₙₓUₙₓ^{m}CₙₓAₙₓUₙₓ^{m}Cₙₓ^{m}Cₙₓ^{m}CₙₓAₙₓ^{m}CₙₓUₙₓGₙₓAₙₓUₙₓUₙₓ^{m}Cₙₓ | 136 | 25 | 53 | 111 | 135 |
| UₙₓGₙₛAₙ | | | | | |
| UₙₛGₙₓUₙₓUₙₓ^{m}CₙₓUₙₓUₙₓGₙₓUₙₓAₙₓ^{m}CₙₓUₙₓUₙₓ^{m}CₙₓAₙₓUₙₓ^{m}Cₙₓ^{m}Cₙₓ^{m}CₙₓAₙₓ^{m}Cₙₓ | 137 | 25 | 53 | 116 | 140 |
| UₙₓGₙₓAₙₛUₙ | | | | | |
| TₙₛTₙₓ^{m}CₙₓTₙₓTₙₓGₙₓTₙₓAₙₓ^{m}CₙₓTₙₓTₙₓ^{m}CₙₓAₙₓTₙₓ^{m}Cₙₓ^{m}Cₙₓ^{m}CₙₛAₙ | 116 | 18 | 53 | 121 | 138 |
| ^{m}CₙₛTₙₓGₙₓAₙₓAₙₓGₙₓGₙₓTₙₓGₙₓTₙₓTₙₓ^{m}CₙₓTₙₓTₙₓGₙₓTₙₓAₙₓ^{m}CₙₓTₙₓTₙₓ^{m}CₙₓAₙₓTₙₓ | 185 | 25 | 53 | 123 | 147 |
| ^{m}Cₙₛ^{m}Cₙ | | | | | |
| ^{m}CₙₛTₙₓGₙₓAₙₓAₙₓGₙₓGₙₓTₙₓGₙₓTₙₓTₙₓ^{m}CₙₓTₙₓTₙₓGₙₓTₙₓAₙₓ^{m}CₙₓTₙₓTₙₓ^{m}CₙₓAₙₓTₙₓ | 185 | 25 | 53 | 123 | 147 |
| ^{m}Cₙₛ^{m}Cₙ | | | | | |
| GₙₛUₙₓUₙₓ^{m}CₙₓUₙₓGₙₓAₙₓAₙₓGₙₓGₙₓUₙₓGₙₓUₙₓUₙₓ^{m}CₙₓUₙₓUₙₓGₙₓUₙₓAₙₓ^{m}CₙₓUₙₓ | 138 | 25 | 53 | 126 | 150 |
| Uₙₓ^{m}CₙₛAₙ | | | | | |
| ^{m}Cₙₛ^{m}CₙₓGₙₓGₙₓUₙₓUₙₓ^{m}CₙₓUₙₓGₙₓAₙₓAₙₓGₙₓGₙₓUₙₓGₙₓUₙₓUₙₓ^{m}CₙₓUₙₓUₙₓGₙₓUₙₓ | 139 | 25 | 53 | 129 | 153 |
| Aₙₓ^{m}CₙₛUₙ | | | | | |
| ^{m}CₙₛTₙₓGₙₓAₙₓAₙₓGₙₓGₙₓTₙₓGₙₓTₙₓTₙₓ^{m}CₙₓTₙₓTₙₓGₙₓTₙₓAₙₓ^{m}Cₙ | 123 | 18 | 53 | 130 | 147 |
| Uₙₛ^{m}Cₙₓ^{m}CₙₓGₙₓGₙₓUₙₓUₙₓ^{m}CₙₓUₙₓGₙₓAₙₓAₙₓGₙₓGₙₓUₙₓGₙₓUₙₓUₙₓ^{m}CₙₓUₙₓUₙₓGₙₓ | 140 | 25 | 53 | 130 | 154 |
| UₙₓAₙₛ^{m}Cₙ | | | | | |
| ^{m}CₙₛTₙₓ^{m}Cₙₓ^{m}CₙₓGₙₓGₙₓTₙₓTₙₓ^{m}CₙₓTₙₓGₙₓAₙₓAₙₓGₙₓGₙₓTₙₓGₙₓTₙₓTₙₓ^{m}CₙₓTₙₓTₙₓGₙₓ | 127 | 25 | 53 | 131 | 155 |
| TₙₛAₙ | | | | | |
| ^{m}CₙₛUₙₓ^{m}Cₙₓ^{m}CₙₓGₙₓGₙₓUₙₓUₙₓ^{m}CₙₓUₙₓGₙₓAₙₓAₙₓGₙₓGₙₓUₙₓGₙₓUₙₓUₙₓ^{m}CₙₓUₙₓUₙₓ | 141 | 25 | 53 | 131 | 155 |
| GₙₓUₙₛAₙ | | | | | |
| ^{m}Cₙₛ^{m}CₙₓGₙₓGₙₓTₙₓTₙₓ^{m}CₙₓTₙₓGₙₓAₙₓAₙₓGₙₓGₙₓTₙₓGₙₓTₙₓTₙₓ^{m}CₙₓTₙₓTₙₓGₙₛTₙ | 128 | 22 | 53 | 132 | 153 |
| ^{m}Cₙₛ^{m}CₙₓTₙₓ^{m}Cₙₓ^{m}CₙₓGₙₓGₙₓTₙₓTₙₓ^{m}CₙₓTₙₓGₙₓAₙₓAₙₓGₙₓGₙₓTₙₓGₙₓTₙₓTₙₓ^{m}CₙₓTₙₓ | 129 | 25 | 53 | 132 | 156 |
| TₙₓGₙₛTₙ | | | | | |
| UₙₛUₙₓ^{m}CₙₓUₙₓGₙₓAₙₓAₙₓGₙₓGₙₓUₙₓGₙₓUₙₓUₙₓ^{m}CₙₓUₙₓUₙₓGₙₓUₙₓ | 142 | 18 | 53 | 132 | 149 |
| GₙₛGₙₓUₙₓUₙₓ^{m}CₙₓUₙₓGₙₓAₙₓAₙₓGₙₓGₙₓUₙₓGₙₓUₙₓUₙₓ^{m}CₙₓUₙₓUₙₓGₙₛUₙ | 143 | 20 | 53 | 132 | 151 |
| ^{m}Cₙₛ^{m}CₙₓUₙₓ^{m}Cₙₓ^{m}CₙₓGₙₓGₙₓUₙₓUₙₓ^{m}CₙₓUₙₓGₙₓAₙₓAₙₓGₙₓGₙₓUₙₓGₙₓUₙₓUₙₓ^{m}Cₙₓ | 144 | 25 | 53 | 132 | 156 |
| UₙₓUₙₓGₙₛUₙ | | | | | |
| UₙₛGₙₓUₙₓUₙₓGₙₓ^{m}Cₙₓ^{m}CₙₓUₙₓ^{m}Cₙₓ^{m}CₙₓGₙₓGₙₓUₙₓUₙₓ^{m}CₙₓUₙₓGₙₓAₙₓAₙₓGₙₓGₙₓUₙₓ | 145 | 30 | 53 | 132 | 161 |
| GₙₓUₙₓUₙₓ^{m}CₙₓUₙₓUₙₓGₙₛUₙ | | | | | |
| Tₙₛ^{m}Cₙₓ^{m}CₙₓGₙₓGₙₓTₙₓTₙₓ^{m}CₙₓTₙₓGₙₓAₙₓAₙₓGₙₓGₙₓTₙₓGₙₓTₙₓTₙₓ^{m}CₙₓTₙₓTₙₛGₙ | 130 | 22 | 53 | 133 | 154 |
| Gₙₛ^{m}Cₙₓ^{m}CₙₓUₙₓ^{m}Cₙₓ^{m}CₙₓGₙₓGₙₓUₙₓUₙₓ^{m}CₙₓUₙₓGₙₓAₙₓAₙₓGₙₓGₙₓUₙₓGₙₓUₙₓUₙₓ^{m}Cₙₓ | 146 | 25 | 53 | 133 | 157 |
| UₙₓUₙₛGₙ | | | | | |
| TₙₛGₙₓ^{m}Cₙₓ^{m}CₙₓTₙₓ^{m}Cₙₓ^{m}CₙₓGₙₓGₙₓTₙₓTₙₓ^{m}CₙₓTₙₓGₙₓAₙₓAₙₓGₙₓGₙₓTₙₓGₙₓTₙₓTₙₓ^{m}Cₙₓ | 131 | 25 | 53 | 134 | 158 |
| TₙₛTₙ | | | | | |
| UₙₛGₙₓ^{m}Cₙₓ^{m}CₙₓUₙₓ^{m}Cₙₓ^{m}CₙₓGₙₓGₙₓUₙₓUₙₓ^{m}CₙₓUₙₓGₙₓAₙₓAₙₓGₙₓGₙₓUₙₓGₙₓUₙₓUₙₓ | 147 | 25 | 53 | 134 | 158 |
| ^{m}CₙₓUₙₛUₙ | | | | | |
| UₙₛUₙₓ^{m}CₙₓUₙₓGₙₓAₙₓAₙₓGₙₓGₙₓUₙₓGₙₓUₙₓUₙₓ^{m}CₙₛUₙ | 148 | 15 | 53 | 135 | 149 |
| ^{m}CₙₛGₙₓGₙₓUₙₓUₙₓ^{m}CₙₓUₙₓGₙₓAₙₓAₙₓGₙₓGₙₓUₙₓGₙₓUₙₓUₙₓ^{m}CₙₛUₙ | 149 | 18 | 53 | 135 | 152 |
| Uₙₛ^{m}Cₙₓ^{m}CₙₓGₙₓGₙₓUₙₓUₙₓ^{m}CₙₓUₙₓGₙₓAₙₓAₙₓGₙₓGₙₓUₙₓGₙₓUₙₓUₙₓ^{m}CₙₛUₙ | 150 | 20 | 53 | 135 | 154 |
| UₙₛUₙₓGₙₓ^{m}Cₙₓ^{m}CₙₓUₙₓ^{m}Cₙₓ^{m}CₙₓGₙₓGₙₓUₙₓUₙₓ^{m}CₙₓUₙₓGₙₓAₙₓAₙₓGₙₓGₙₓUₙₓGₙₓUₙₓ | 151 | 25 | 53 | 135 | 159 |
| Uₙₓ^{m}CₙₛUₙ | | | | | |
| GₙₛUₙₓUₙₓGₙₓ^{m}Cₙₓ^{m}CₙₓUₙₓ^{m}Cₙₓ^{m}CₙₓGₙₓGₙₓUₙₓUₙₓ^{m}CₙₓUₙₓGₙₓAₙₓAₙₓGₙₓGₙₓUₙₓGₙₓ | 44 | 25 | 53 | 136 | 160 |
| UₙₓUₙₛ^{m}Cₙ | | | | | |
| ^{m}Cₙₛ^{m}CₙₓGₙₓGₙₓTₙₓTₙₓCₙₓTₙₓGₙₓAₙₓAₙₓGₙₓGₙₓTₙₓGₙₓTₙₓTₙₛ^{m}Cₙ | 132 | 18 | 53 | 136 | 153 |
| ^{m}CₙₛTₙₓ^{m}Cₙₓ^{m}CₙₓGₙₓGₙₓTₙₓTₙₓ^{m}CₙₓTₙₓGₙₓAₙₓAₙₓGₙₓGₙₓTₙₓGₙₓTₙₓTₙₛ^{m}Cₙ | 133 | 20 | 53 | 136 | 155 |
| ^{m}Cₙₛ^{m}CₙₓTₙₓ^{m}Cₙₓ^{m}CₙₓGₙₓGₙₓTₙₓTₙₓ^{m}CₙₓTₙₓGₙₓAₙₓAₙₓGₙₓGₙₓTₙₓGₙₓTₙₓTₙₛ^{m}Cₙ | 134 | 21 | 53 | 136 | 156 |
| Gₙₛ^{m}Cₙₓ^{m}CₙₓTₙₓ^{m}Cₙₓ^{m}CₙₓGₙₓGₙₓTₙₓTₙₓ^{m}CₙₓTₙₓGₙₓAₙₓAₙₓGₙₓGₙₓTₙₓGₙₓTₙₓTₙₛ^{m}Cₙₓ | 135 | 22 | 53 | 136 | 157 |
| GₙₛUₙₓUₙₓGₙₓ^{m}Cₙₓ^{m}CₙₓUₙₓ^{m}Cₙₓ^{m}CₙₓGₙₓGₙₓUₙₓUₙₓ^{m}CₙₓUₙₓGₙₓAₙₓAₙₓGₙₓGₙₓUₙₓGₙₓ | 44 | 25 | 53 | 136 | 160 |
| UₙₓUₙₛ^{m}Cₙ | | | | | |
| ^{m}Cₙₛ^{m}CₙₓUₙₓ^{m}Cₙₓ^{m}CₙₓGₙₓGₙₓUₙₓUₙₓ^{m}CₙₓUₙₓGₙₓAₙₓAₙₓGₙₓGₙₓUₙₓGₙₓUₙₛUₙ | 152 | 20 | 53 | 137 | 156 |
| UₙₛGₙₓUₙₓUₙₓGₙₓ^{m}Cₙₓ^{m}CₙₓUₙₓ^{m}Cₙₓ^{m}CₙₓGₙₓGₙₓUₙₓUₙₓ^{m}CₙₓUₙₓGₙₓAₙₓAₙₓGₙₓGₙₓUₙₓ | 153 | 25 | 53 | 137 | 161 |
| GₙₓUₙₛUₙ | | | | | |
| ^{m}CₙₛUₙₓ^{m}Cₙₓ^{m}CₙₓGₙₓGₙₓUₙₓUₙₓ^{m}CₙₓUₙₓGₙₓAₙₓAₙₓGₙₓGₙₓUₙₓGₙₓUₙ | 154 | 18 | 53 | 138 | 155 |
| ^{m}CₙₛUₙₓGₙₓUₙₓUₙₓGₙₓ^{m}Cₙₓ^{m}CₙₓUₙₓ^{m}Cₙₓ^{m}CₙₓGₙₓGₙₓUₙₓUₙₓ^{m}CₙₓUₙₓGₙₓAₙₓAₙₓGₙₓ | 155 | 25 | 53 | 138 | 162 |
| GₙₓUₙₓGₙₛUₙ | | | | | |
| ^{m}CₙₛTₙₓGₙₓTₙₓTₙₓGₙₓ^{m}Cₙₓ^{m}CₙₓTₙₓ^{m}Cₙₓ^{m}CₙₓGₙₓGₙₓTₙₓTₙₓ^{m}CₙₓTₙₓGₙₓAₙₓAₙₓGₙₓGₙₓ | 186 | 25 | 53 | 138 | 162 |
| TₙₓGₙₛTₙ | | | | | |
| ^{m}CₙₛAₙₓUₙₓUₙₓ^{m}CₙₓAₙₓAₙₓ^{m}CₙₓUₙₓGₙₓUₙₓUₙₓGₙₓ^{m}Cₙₓ^{m}CₙₓUₙₓ^{m}Cₙₓ^{m}CₙₓGₙₓGₙₓUₙₓ | 80 | 31 | 53 | 139 | 169 |
| Uₙₓ^{m}CₙₓUₙₓGₙₓAₙₓAₙₓGₙₓGₙₓUₙₛGₙ | | | | | |
| ^{m}Cₙₛ^{m}CₙₓUₙₓ^{m}Cₙₓ^{m}CₙₓGₙₓGₙₓTₙₓTₙₓ^{m}CₙₓTₙₓGₙₓAₙₓAₙₓGₙₓGₙₓTₙₛGₙ | 117 | 18 | 53 | 139 | 156 |
| Aₙₛ^{m}CₙₓUₙₓGₙₓUₙₓUₙₓGₙₓ^{m}Cₙₓ^{m}CₙₓUₙₓ^{m}Cₙₓ^{m}CₙₓGₙₓGₙₓUₙₓUₙₓ^{m}CₙₓUₙₓGₙₓAₙₓAₙₓ | 156 | 25 | 53 | 139 | 163 |
| GₙₓGₙₓUₙₛGₙ | | | | | |
| ^{m}CₙₛAₙₓUₙₓUₙₓ^{m}CₙₓAₙₓAₙₓ^{m}CₙₓUₙₓGₙₓUₙₓUₙₓGₙₓ^{m}Cₙₓ^{m}CₙₓUₙₓ^{m}Cₙₓ^{m}CₙₓGₙₓGₙₓUₙₓ | 80 | 31 | 53 | 139 | 169 |
| Uₙₓ^{m}CₙₓUₙₓGₙₓAₙₓAₙₓGₙₓGₙₓUₙₛGₙ | | | | | |
| ^{m}CₙₛAₙₓTₙₓTₙₓ^{m}CₙₓAₙₓAₙₓ^{m}CₙₓTₙₓGₙₓTₙₓTₙₓGₙₓ^{m}Cₙₓ^{m}CₙₓTₙₓ^{m}Cₙₓ^{m}CₙₓGₙₓGₙₓTₙₓTₙₓ | 187 | 31 | 53 | 139 | 169 |
| ^{m}CₙₓTₙₓGₙₓAₙₓAₙₓGₙₓGₙₓTₙₛGₙ | | | | | |
| Uₙₛ^{m}Cₙₓ^{m}CₙₓGₙₓGₙₓUₙₓUₙₓ^{m}CₙₓUₙₓGₙₓAₙₓAₙₓGₙₓGₙₛUₙ | 157 | 15 | 53 | 140 | 154 |
| UₙₛUₙₓGₙₓ^{m}Cₙₓ^{m}CₙₓUₙₓ^{m}Cₙₓ^{m}CₙₓGₙₓGₙₓUₙₓUₙₓ^{m}CₙₓUₙₓGₙₓAₙₓAₙₓGₙₓGₙₛUₙ | 158 | 20 | 53 | 140 | 159 |
| AₙₛAₙₓ^{m}CₙₓUₙₓGₙₓUₙₓUₙₓGₙₓ^{m}Cₙₓ^{m}CₙₓUₙₓ^{m}Cₙₓ^{m}CₙₓGₙₓGₙₓUₙₓUₙₓ^{m}CₙₓUₙₓGₙₓAₙₓ | 159 | 25 | 53 | 140 | 164 |
| AₙₓGₙₓGₙₛUₙ | | | | | |
| UₙₛGₙₓ^{m}Cₙₓ^{m}CₙₓUₙₓ^{m}Cₙₓ^{m}CₙₓGₙₓGₙₓUₙₓUₙₓ^{m}CₙₓUₙₓGₙₓAₙₓAₙₓGₙₛGₙ | 160 | 18 | 53 | 141 | 158 |
| ^{m}CₙₛAₙₓAₙₓ^{m}CₙₓUₙₓGₙₓUₙₓUₙₓGₙₓ^{m}Cₙₓ^{m}CₙₓUₙₓ^{m}Cₙₓ^{m}CₙₓGₙₓGₙₓUₙₓUₙₓ^{m}CₙₓUₙₓGₙₓ | 161 | 25 | 53 | 141 | 165 |
| AₙₓAₙₓGₙₛGₙ | | | | | |
| UₙₛGₙₓUₙₓUₙₓGₙₓ^{m}Cₙₓ^{m}CₙₓUₙₓ^{m}Cₙₓ^{m}CₙₓGₙₓGₙₓUₙₓUₙₓ^{m}CₙₓUₙₓGₙₓAₙₓAₙₛGₙ | 162 | 20 | 53 | 142 | 161 |
| UₙₛGₙₓUₙₓUₙₓGₙₓ^{m}Cₙₓ^{m}CₙₓUₙₓ^{m}Cₙₓ^{m}CₙₓGₙₓGₙₓUₙₓUₙₓ^{m}CₙₓUₙₓGₙₛAₙ | 163 | 18 | 53 | 144 | 161 |
| UₙₛUₙₓGₙₓ^{m}Cₙₓ^{m}CₙₓUₙₓ^{m}Cₙₓ^{m}CₙₓGₙₓGₙₓUₙₓUₙₓ^{m}CₙₓUₙₛGₙ | 164 | 15 | 53 | 145 | 159 |
| ^{m}CₙₛUₙₓGₙₓUₙₓUₙₓGₙₓ^{m}Cₙₓ^{m}CₙₓUₙₓ^{m}Cₙₓ^{m}CₙₓGₙₓGₙₓUₙₓUₙₓ^{m}CₙₓUₙₛGₙ | 165 | 18 | 53 | 145 | 162 |
| ^{m}CₙₛTₙₓGₙₓTₙₓTₙₓGₙₓ^{m}Cₙₓ^{m}CₙₓTₙₓ^{m}Cₙₓ^{m}CₙₓGₙₓGₙₓTₙₓTₙₓ^{m}CₙₓTₙₛGₙ | 188 | 18 | 53 | 145 | 162 |
| Uₙₛ^{m}CₙₓAₙₓUₙₓUₙₓ^{m}CₙₓAₙₓAₙₓ^{m}CₙₓUₙₓGₙₓUₙₓUₙₓGₙₓ^{m}Cₙₓ^{m}CₙₓUₙₓ^{m}Cₙₓ^{m}CₙₓGₙₓGₙₓ | 166 | 25 | 53 | 146 | 170 |
| UₙₓUₙₓ^{m}CₙₛUₙ | | | | | |
| ^{m}CₙₛAₙₓTₙₓTₙₓUₙₓ^{m}CₙₓAₙₓUₙₓTₙₓ^{m}CₙₓAₙₓAₙₓ^{m}CₙₓTₙₓGₙₓTₙₓTₙₛGₙ | 118 | 18 | 53 | 157 | 174 |
| TₙₛTₙₓ^{m}Cₙₓ^{m}CₙₓAₙₓGₙₓ^{m}Cₙₓ^{m}CₙₓAₙₓTₙₓTₙₓGₙₓTₙₓGₙₓTₙₓTₙₓGₙₛAₙ | 124 | 18 | 53 | 184 | 201 |
| TₙₛTₙₓ^{m}Cₙₓ^{m}CₙₓTₙₓTₙₓAₙₓGₙₓ^{m}CₙₓTₙₓUₙₓ^{m}Cₙₓ^{m}CₙₓAₙₓGₙₓ^{m}Cₙₓ^{m}CₙₛAₙ | 119 | 18 | 53 | 193 | 210 |
| Gₙₛ^{m}CₙₓTₙₓTₙₓ^{m}CₙₓUₙₓTₙₓ^{m}Cₙₓ^{m}CₙₓUₙₓTₙₓAₙₓGₙₓ^{m}CₙₓUₙₓTₙₓ^{m}Cₙₛ^{m}Cₙ | 126 | 18 | 53 | 198 | 215 |
| Aₙₛ^{m}Cₙₛ^{m}CₙₓUₙₓGₙₓ^{m}CₙₓUₙₓ^{m}CₙₓAₙₓGₙₓ^{m}CₙₓUₙₓUₙₓ^{m}CₙₓUₙₓUₙₓ^{m}Cₙₓ^{m}CₙₓUₙₓUₙₓAₙₓ | 63 | 25 | 53 | 200 | 224 |
| Gₙₓ^{m}CₙₓUₙₛUₙ | | | | | |
| ^{m}CₙₛTₙₓ^{m}CₙₓAₙₓGₙₓ^{m}CₙₓTₙₓUₙₓ^{m}CₙₓTₙₓTₙₓ^{m}Cₙₓ^{m}CₙₓTₙₓTₙₓAₙₓGₙₛ^{m}Cₙ | 125 | 18 | 53 | 202 | 219 |
| TₙₛAₙₓAₙₓGₙₓAₙₓ^{m}Cₙₓ^{m}CₙₓTₙₓGₙₓ^{m}CₙₓTₙₓ^{m}CₙₓAₙₓGₙₓ^{m}CₙₓUₙₓTₙₛ^{m}Cₙ | 120 | 18 | 53 | 211 | 228 |
| UₙₛUₙₓGₙₓGₙₓ^{m}CₙₓUₙₓ^{m}CₙₓUₙₓGₙₓGₙₓ^{m}Cₙₓ^{m}CₙₓUₙₓGₙₓUₙₓ^{m}Cₙₓ^{m}CₙₓUₙₓAₙₓAₙₓGₙₓ | 167 | 25 | 53 | 221 | 245 |
| Aₙₓ^{m}Cₙₓ^{m}CₙₛUₙ | | | | | |
| ^{m}CₙₛAₙₓAₙₓGₙₓ^{m}CₙₓUₙₓUₙₓGₙₓGₙₓ^{m}CₙₓUₙₓ^{m}CₙₓUₙₓGₙₓGₙₓ^{m}Cₙₓ^{m}CₙₓUₙₓGₙₓUₙₓ^{m}Cₙₓ | 168 | 25 | 53 | 226 | 250 |
| ^{m}CₙₓUₙₓAₙₛAₙ | | | | | |
| ^{m}CₙₛTₙₓTₙₓGₙₓGₙₓ^{m}CₙₓTₙₓ^{m}CₙₓTₙₓGₙₓGₙₓ^{m}Cₙₓ^{m}CₙₓTₙₓGₙₓUₙₓ^{m}Cₙₛ^{m}Cₙ | 121 | 18 | 53 | 229 | 246 |
| ^{m}CₙₛTₙₓ^{m}Cₙₓ^{m}CₙₓTₙₓUₙₓ^{m}Cₙₓ^{m}CₙₓAₙₓTₙₓGₙₓAₙₓ^{m}CₙₓTₙₓ^{m}CₙₓAₙₓAₙₛGₙ | 122 | 18 | 53 | 247 | 264 |

### CERTAIN EMBODIMENTS

### Embodiment 1

[0079] An oligomeric compound comprising a modified oligonucleotide consisting of 14-30 linked nucleosides, wherein the modified oligonucleotide is complementary to a Dystrophin pre-mRNA; and wherein each of at least 6 of the 14-30 linked nucleosides of the modified oligonucleotide has a structure independently selected from Formula I:

[chemical structure]

[0080] b. wherein Bx is a nucleobase;
[0081] c. and R¹ for each nucleoside of Formula I is independently selected from among: C(═O)N(H)R² and CH₂OCH₃; wherein R² for each nucleoside of Formula I is independently selected from among: methyl, ethyl, propyl, and isopropyl.

### Embodiment 2

[0082] The oligomeric compound of embodiment 1, wherein each Bx is selected from among adenine, guanine, cytosine, thymine, uracil, and 5-methyl cytosine.

### Embodiment 3

[0083] The oligomeric compound of embodiment 1 or 2, wherein each R¹ is CH₂OCH₃.

### Embodiment 4

[0084] The oligomeric compound of embodiment 1 or 2, wherein each R¹ is C(═O)N(H)R².

### Embodiment 5

[0085] The oligomeric compound of embodiment 1 or 4, wherein each R² is selected from methyl and ethyl.

### Embodiment 6

[0086] The oligomeric compound of embodiment 5, wherein each R² is methyl.

### Embodiment 7

[0087] The oligomeric compound of any of embodiments 1-6, wherein 7 nucleosides of the modified oligonucleotide each has a structure independently selected from Formula I.

### Embodiment 8

[0088] The oligomeric compound of any of embodiments 1-6, wherein 8 nucleosides of the modified oligonucleotide each has a structure independently selected from Formula I.

### Embodiment 9

[0089] The oligomeric compound of any of embodiments 1-6, wherein 9 nucleosides of the modified oligonucleotide each has a structure independently selected from Formula I.

### Embodiment 10

[0090] The oligomeric compound of any of embodiments 1-6, wherein 10 nucleosides of the modified oligonucleotide each has a structure independently selected from Formula I.

### Embodiment 11

[0091] The oligomeric compound of any of embodiments 1-6, wherein 11 nucleosides of the modified oligonucleotide each has a structure independently selected from Formula I.

### Embodiment 12

[0092] The oligomeric compound of any of embodiments 1-6, wherein 12 nucleosides of the modified oligonucleotide each has a structure independently selected from Formula I.

### Embodiment 13

[0093] The oligomeric compound of any of embodiments 1-6, wherein 13 nucleosides of the modified oligonucleotide each has a structure independently selected from Formula I.

### Embodiment 14

[0094] The oligomeric compound of any of embodiments 1-6, wherein 14 nucleosides of the modified oligonucleotide each has a structure independently selected from Formula I.

### Embodiment 15

[0095] The oligomeric compound of any of embodiments 1-6, wherein 15 nucleosides of the modified oligonucleotide each has a structure independently selected from Formula I.

### Embodiment 16

[0096] The oligomeric compound of any of embodiments 1-6, wherein 16 nucleosides of the modified oligonucleotide each has a structure independently selected from Formula I.

### Embodiment 17

[0097] The oligomeric compound of any of embodiments 1-6, wherein 17 nucleosides of the modified oligonucleotide each has a structure independently selected from Formula I.

### Embodiment 18

[0098] The oligomeric compound of any of embodiments 1-6, wherein 18 nucleosides of the modified oligonucleotide each has a structure independently selected from Formula I.

### Embodiment 19

[0099] The oligomeric compound of any of embodiments 1-6, wherein 19 nucleosides of the modified oligonucleotide each has a structure independently selected from Formula I.

### Embodiment 20

[0100] The oligomeric compound of any of embodiments 1-6, wherein 20 nucleosides of the modified oligonucleotide each has a structure independently selected from Formula I.

### Embodiment 21

[0101] The oligomeric compound of any of embodiments 1-20, wherein the modified oligonucleotide comprises at least one modified nucleoside of Formula I wherein R² is methyl.

### Embodiment 22

[0102] The oligomeric compound of any of embodiments 1-21, wherein R¹ is the same for each of the modified nucleosides of Formula I.

### Embodiment 23

[0103] An oligomeric compound comprising a modified oligonucleotide consisting of 14-30 linked nucleosides, wherein the modified oligonucleotide is complementary to a Dystrophin pre-mRNA; and wherein each of at least 6 of the 14-30 linked nucleosides of the modified oligonucleotide is an independently selected modified nucleoside comprising a 2′-O—(N-alkyl acetamide) modified sugar moiety and a 2′-MOE modified sugar moiety.

### Embodiment 24

[0104] The oligomeric compound of embodiment 23, wherein each 2′-O—(N-alkyl acetamide) modified nucleoside is either a 2′-O—(N-methyl acetamide) modified nucleoside or a 2′-O—(N-ethyl acetamide) modified nucleoside.

### Embodiment 25

[0105] The oligomeric compound of embodiment 23 or 24, wherein each of 7 nucleosides of the modified oligonucleotide comprises an independently selected 2′-O—(N-alkyl acetamide) modified sugar moiety.

### Embodiment 26

[0106] The oligomeric compound of embodiment 23 or 24, wherein each of 8 nucleosides of the modified oligonucleotide comprises an independently selected 2′-O—(N-alkyl acetamide) modified sugar moiety.

### Embodiment 27

[0107] The oligomeric compound of embodiment 23 or 24, wherein each of 9 nucleosides of the modified oligonucleotide comprises an independently selected 2′-O—(N-alkyl acetamide) modified sugar moiety.

### Embodiment 28

[0108] The oligomeric compound of embodiment 23 or 24, wherein each of 10 nucleosides of the modified oligonucleotide comprises an independently selected 2′-O—(N-alkyl acetamide) modified sugar moiety.

### Embodiment 29

[0109] The oligomeric compound of embodiment 23 or 24, wherein each of 11 nucleosides of the modified oligonucleotide comprises an independently selected 2′-O—(N-alkyl acetamide) modified sugar moiety.

### Embodiment 30

[0110] The oligomeric compound of embodiment 23 or 24, wherein each of 12 nucleosides of the modified oligonucleotide comprises an independently selected 2′-O—(N-alkyl acetamide) modified sugar moiety.

### Embodiment 31

[0111] The oligomeric compound of embodiment 23 or 24, wherein each of 13 nucleosides of the modified oligonucleotide comprises an independently selected 2′-O—(N-alkyl acetamide) modified sugar moiety.

### Embodiment 32

[0112] The oligomeric compound of embodiments 23 or 24, wherein each of 14 nucleosides of the modified oligonucleotide comprises an independently selected 2′-O—(N-alkyl acetamide) modified sugar moiety.

### Embodiment 33

[0113] The oligomeric compound of embodiment 23 or 24, wherein each of 15 nucleosides of the modified oligonucleotide comprises an independently selected 2′-O—(N-alkyl acetamide) modified sugar moiety.

### Embodiment 34

[0114] The oligomeric compound of embodiment 23 or 24, wherein each of 16 nucleosides of the modified oligonucleotide comprises an independently selected 2′-O—(N-alkyl acetamide) modified sugar moiety.

### Embodiment 35

[0115] The oligomeric compound of embodiment 23 or 24, wherein each of 17 nucleosides of the modified oligonucleotide comprises an independently selected 2′-O—(N-alkyl acetamide) modified sugar moiety.

### Embodiment 36

[0116] The oligomeric compound of embodiment 23 or 24, wherein each of 18 nucleosides of the modified oligonucleotide comprises an independently selected 2′-O—(N-alkyl acetamide) modified sugar moiety.

### Embodiment 37

[0117] The oligomeric compound of embodiment 23 or 24, wherein each of 19 nucleosides of the modified oligonucleotide comprises an independently selected 2′-O—(N-alkyl acetamide) modified sugar moiety.

### Embodiment 38

[0118] The oligomeric compound of embodiment 23 or 24, wherein each of 20 nucleosides of the modified oligonucleotide comprises an independently selected 2′-O—(N-alkyl acetamide) modified sugar moiety.

### Embodiment 39

[0119] The oligomeric compound of any of embodiments 23-38, wherein at least one of the 2′-O—(N-alkyl acetamide) modified sugar moieties is a 2′-O—(N-methyl acetamide) modified sugar moiety.

### Embodiment 40

[0120] The oligomeric compound of any of embodiments 23-39, wherein the N-alkyl group of each of the 2′-O—(N-alkyl acetamide) modified sugar moieties is the same N-alkyl group.

### Embodiment 41

[0121] The oligomeric compound of any of embodiments 23-40, wherein each of the 2′-O—(N-alkyl acetamide) modified sugar moieties is a 2′-O—(N-methyl acetamide) modified sugar moiety.

### Embodiment 42

[0122] The oligomeric compound of any of embodiments 1-41, wherein each nucleoside of the modified oligonucleotide comprises a 2′-O—(N-methyl acetamide) modified sugar moiety.

### Embodiment 43

[0123] The oligomeric compound of any of embodiments 1-42, wherein each nucleoside of the modified oligonucleotide comprises a modified sugar moiety.

### Embodiment 44

[0124] The oligomeric compound of embodiment 43, wherein each nucleoside comprises an independently selected 2′-modified non-bicyclic sugar moiety.

### Embodiment 45

[0125] The oligomeric compound of embodiment 43, wherein each nucleoside comprises an independently selected 2′-modified, non-bicyclic sugar moiety or a bicyclic sugar moiety.

### Embodiment 46

[0126] The oligomeric compound of embodiment 43, wherein each 2′-modified, non-bicyclic sugar moiety is a 2′-O—(N-alkyl acetamide) sugar moiety.

### Embodiment 47

[0127] The oligomeric compound of embodiment 46, wherein each 2′-O—(N-alkyl acetamide) sugar moiety is a 2′-O—(N-methyl acetamide) sugar moiety.

### Embodiment 48

[0128] The oligomeric compound of any of embodiments 1-47, wherein the modified oligonucleotide consists of 16-23 linked nucleosides.

### Embodiment 49

[0129] The oligomeric compound of any of embodiments 1-47, wherein the modified oligonucleotide consists of 18-20 linked nucleosides.

### Embodiment 50

[0130] The oligomeric compound of any of embodiments 1-47, wherein the modified oligonucleotide consists of 16 nucleosides.

### Embodiment 51

[0131] The oligomeric compound of any of embodiments 1-47, wherein the modified oligonucleotide consists of 17 nucleosides.

### Embodiment 52

[0132] The oligomeric compound of any of embodiments 1-47, wherein the modified oligonucleotide consists of 18 nucleosides.

### Embodiment 53

[0133] The oligomeric compound of any of embodiments 1-47, wherein the modified oligonucleotide consists of 19 nucleosides.

### Embodiment 54

[0134] The oligomeric compound of any of embodiments 1-47, wherein the modified oligonucleotide consists of 20 nucleosides.

### Embodiment 55

[0135] The oligomeric compound of any of embodiments 1-54, wherein the modified oligonucleotide comprises at least one modified internucleoside linkage.

### Embodiment 56

[0136] The oligomeric compound of any of embodiments 1-55, wherein the modified oligonucleotide comprises at least one phosphorothioate internucleoside linkage.

### Embodiment 57

[0137] The oligomeric compound of embodiment 56, wherein each internucleoside linkage of the modified oligonucleotide is selected from among a phosphorothioate internucleoside linkage and a phosphate internucleoside linkage.

### Embodiment 58

[0138] The oligomeric compound of embodiment 57, wherein the phosphate internucleoside linkage is a phosphodiester internucleoside linkage.

### Embodiment 59

[0139] The oligomeric compound of any of embodiments 1-57, wherein each internucleoside linkage of the modified oligonucleotide is a phosphorothioate internucleoside linkage.

### Embodiment 60

[0140] The oligomeric compound of any of embodiments 1-59, wherein the modified oligonucleotide comprises at least one modified nucleobase.

### Embodiment 61

[0141] The oligomeric compound of any of embodiments 1-60, wherein the modified oligonucleotide comprises at least one 5-methyl cytosine.

### Embodiment 62

[0142] The oligomeric compound of any of embodiments 1-61, wherein each nucleobase of the modified oligonucleotide is selected from among thymine, 5-methyl cytosine, cytosine, adenine, uracil, and guanine.

### Embodiment 63

[0143] The oligomeric compound of any of embodiments 1-62, wherein each cytosine of the modified oligonucleotide is a 5-methyl cytosine.

### Embodiment 64

[0144] The oligomeric compound of any of embodiments 1-63, wherein each nucleobase of the modified oligonucleotide is selected from among thymine, 5-methyl cytosine, adenine, and guanine.

### Embodiment 65

[0145] The oligomeric compound of any of embodiments 1-64, wherein the modified oligonucleotide is complementary to exon 51 of Dystrophin pre-mRNA.

### Embodiment 66

[0146] The oligomeric compound of any of embodiments 1-64, wherein the modified oligonucleotide is complementary to exon 53 of Dystrophin pre-mRNA.

### Embodiment 67

[0147] The oligomeric compound of any of embodiments 1-64, wherein the modified oligonucleotide is complementary to exon 2, 8, 43, 44, 45, 46, 50, or 52 of Dystrophin pre-mRNA.

### Embodiment 68

[0148] The oligomeric compound of any of embodiments 1-67, wherein the modified oligonucleotide is at least 70% complementary to the Dystrophin pre-mRNA.

### Embodiment 69

[0149] The oligomeric compound of any of embodiments 1-67, wherein the modified oligonucleotide is at least 75% complementary to the Dystrophin pre-mRNA.

### Embodiment 70

[0150] The oligomeric compound of any of embodiments 1-67, wherein the modified oligonucleotide is at least 80% complementary to the Dystrophin pre-mRNA.

### Embodiment 71

[0151] The oligomeric compound of any of embodiments 1-67, wherein the modified oligonucleotide is at least 85% complementary to a target precursor transcript.

### Embodiment 72

[0152] The oligomeric compound of any of embodiments 1-67, wherein the modified oligonucleotide is at least 90% complementary to the Dystrophin pre-mRNA.

### Embodiment 73

[0153] The oligomeric compound of any of embodiments 1-67, wherein the modified oligonucleotide is at least 95% complementary to the Dystrophin pre-mRNA.

### Embodiment 74

[0154] The oligomeric compound of any of embodiments 1-67, wherein the modified oligonucleotide is at least 100% complementary to the Dystrophin pre-mRNA.

### Embodiment 75

[0155] The oligomeric compound of any of embodiments 1-74, wherein the modified oligonucleotide is complementary to a portion of the Dystrophin pre-mRNA that contains a processing site.

### Embodiment 76

[0156] The oligomeric compound of any of embodiments 1-75, wherein the modified oligonucleotide is complementary to a portion of the Dystrophin pre-mRNA that contains a mutation.

### Embodiment 77

[0157] The oligomeric compound of any of embodiments 1-76, wherein the modified oligonucleotide is complementary to a portion of the Dystrophin pre-mRNA that contains a cryptic processing site.

### Embodiment 78

[0158] The oligomeric compound of any of embodiments 1-77, wherein the modified oligonucleotide is complementary to a portion of the Dystrophin pre-mRNA that contains an abberant processing site.

### Embodiment 79

[0159] The oligomeric compound of any of embodiments 1-78, wherein the modified oligonucleotide is complementary to a portion of the Dystrophin pre-mRNA that contains an intron-exon junction.

### Embodiment 80

[0160] The oligomeric compound of any of embodiments 1-79 wherein the modified oligonucleotide is complementary to an exon of the Dystrophin pre-mRNA

### Embodiment 81

[0161] The oligomeric compound of any of embodiments 1-79, wherein the modified oligonucleotide is complementary to an intron of the pre-mRNA.

### Embodiment 82

[0162] The oligomeric compound of any of embodiments 1-74, wherein the modified oligonucleotide comprises at least 8 contiguous nucleobases of any of the nucleobase sequences of SEQ ID NOs: 3-207.

### Embodiment 83

[0163] The oligomeric compound of any of embodiments 1-74, wherein the modified oligonucleotide comprises at least 12 contiguous nucleobases of any of the nucleobase sequences of SEQ ID NOs: 3-207.

### Embodiment 84

[0164] The oligomeric compound of any of embodiments 1-74, wherein the modified oligonucleotide comprises at least 14 contiguous nucleobases of any of the nucleobase sequences of SEQ ID NOs: 3-207.

### Embodiment 85

[0165] The oligomeric compound of any of embodiments 1-74, wherein the modified oligonucleotide comprises at least 8 contiguous nucleobases of any of the nucleobase sequences of SEQ ID NOs: 3-207.

### Embodiment 86

[0166] The oligomeric compound of any of embodiments 1-74, wherein the modified oligonucleotide comprises at least 16 contiguous nucleobases of any of the nucleobase sequences of SEQ ID NOs: 3-207.

### Embodiment 87

[0167] The oligomeric compound of any of embodiments 1-74, wherein the modified oligonucleotide comprises the nucleobase sequences of any of SEQ ID NOs: 3-207.

### Embodiment 88

[0168] The oligomeric compound of any of embodiments 1-74, wherein the modified oligonucleotide consists of the nucleobase sequences of any of SEQ ID NOs: 3-207.

### Embodiment 89

[0169] The oligomeric compound of any of embodiments 1-88, wherein the oligomeric compound comprises a conjugate group.

### Embodiment 90

[0170] The oligomeric compound of embodiment 89, wherein the conjugate group comprises a lipid or lipophilic group.

### Embodiment 91

[0171] The oligomeric compound of embodiment 90, wherein the lipid or lipophilic group is selected from among: cholesterol, a C10-C26 saturated fatty acid, a C10-C26 unsaturated fatty acid, C10-C26 alkyl, a triglyceride, tocopherol, or cholic acid.

### Embodiment 92

[0172] The oligomeric compound of embodiment 91, wherein the lipid or lipophilic group is a saturated hydrocarbon chain or an unsaturated hydrocarbon chain.

### Embodiment 93

[0173] The oligomeric compound of any of embodiments 89-92, wherein the lipid or lipophilic group is a C16 lipid.

### Embodiment 94

[0174] The oligomeric compound of any of embodiments 89-92, wherein the lipid or lipophilic group is a C18 lipid.

### Embodiment 95

[0175] The oligomeric compound of any of embodiments 89-92, wherein the lipid or lipophilic group is C16 alkyl.

### Embodiment 96

[0176] The oligomeric compound of any of embodiments 89-92, wherein the lipid or lipophilic group is C18 alkyl.

### Embodiment 97

[0177] The oligomeric compound of embodiment 91, wherein the lipid or lipophilic group is cholesterol.

### Embodiment 98

[0178] The oligomeric compound of embodiment 91, wherein the lipid or lipophilic group is tocopherol.

### Embodiment 99

[0179] The oligomeric compound of embodiment 91, wherein the lipid or lipophilic group is saturated C16.

### Embodiment 100

[0180] The oligomeric compound of any of embodiments 89-99, wherein the conjugate group is attached to the modified oligonucleotide at the 5′-end of the modified oligonucleotide.

### Embodiment 101

[0181] The oligomeric compound of any of embodiments 89-99, wherein the conjugate group is attached to the modified oligonucleotide at the 3′-end of the modified oligonucleotide.

### Embodiment 102

[0182] The oligomeric compound of any of embodiments 89-101, wherein the conjugate group comprises a cleavable linker.

### Embodiment 103

[0183] The oligomeric compound of embodiment 102 wherein the cleavable linker comprises one or more linker nucleosides.

### Embodiment 104

[0184] The oligomeric compound of any of embodiments 1-88 consisting of the modified oligonucleotide.

### Embodiment 105

[0185] The oligomeric compound of any of embodiments 89-103 consisting of the modified oligonucleotide and the conjugate group.

### Embodiment 106

[0186] The oligomeric compound of any of embodiments 1-105, wherein the oligomeric compound is single stranded.

### Embodiment 107

[0187] The oligomeric compound of any of embodiments 1-105, wherein the oligomeric compound is paired with a complementary oligomeric compound to form a double stranded compound.

### Embodiment 108

[0188] The oligomeric compound of embodiment 107, wherein the complementary oligomeric compound comprises a conjugate group.

### Embodiment 109

[0189] A pharmaceutical composition comprising the oligomeric compound of any of embodiments 1-105.

### Embodiment 110

[0190] A method of modulating processing of a Dystrophin pre-mRNA in a cell comprising contacting the cell with the oligomeric compound or composition of any of embodiments 1-109.

### Embodiment 111

[0191] The method of embodiment 110, wherein the modulation of processing of the Dystrophin pre-mRNA results in increased exclusion of an exon in the target mRNA relative to the amount of exclusion of said Dystrophin pre-mRNA produced in the absence of the oligomeric compound or composition.

### Embodiment 112

[0192] The method of embodiment 110 or 111, wherein the cell is a muscle cell.

### Embodiment 113

[0193] The method of any of embodiments 110-112, wherein the cell is in an animal.

### Embodiment 114

[0194] The method of any of embodiments 110-113, wherein the cell is in a human.

### Embodiment 115

[0195] A method of treating a disease or condition by modulating processing of a Dystrophin pre-mRNA, comprising administering the oligomeric compound or composition of any of embodiments 1 to 109 to a patient in need thereof.

### Embodiment 116

[0196] The method of any of embodiments 110-115, wherein administration of the oligomeric compound or composition results in increased inclusion of an exon in a target mRNA that is excluded from said target mRNA in the disease or condition.

### Embodiment 117

[0197] The method of embodiment 115 or 116, wherein the administration is systemic.

### Embodiment 118

[0198] The method of embodiment 117, wherein the administration is subcutaneous.

### Embodiment 119

[0199] An oligomeric compound of any of embodiments 1 to 108 or the composition of embodiments 109 for use in therapy.

### Embodiment 120

[0200] Use of an oligomeric compound of any of embodiments 1 to 108 or the composition of embodiments 109 for the preparation of a medicament for the treatment of a disease or condition.

### Embodiment 121

[0201] Use of an oligomeric compound of any of embodiments 1 to 108 or the composition of embodiments 109 for the preparation of a medicament for the treatment of DMD.

### Embodiment 122

[0202] Any of the above compounds or methods, wherein the Dystrophin pre-mRNA comprises a nucleobase sequence selected from any of SEQ ID Nos: 218, 219, 220, 221, 222, 223, 224, 225, 226, and/or 227.

[0203] I. Certain Oligonucleotides

[0204] In certain embodiments, the invention provides oligonucleotides, which consist of linked nucleosides. Oligonucleotides may be unmodified oligonucleotides (unmodified RNA or DNA) or may be modified oligonucleotides. Modified oligonucleotides comprise at least one modification relative to unmodified RNA or DNA (i.e., comprise at least one modified nucleoside (comprising a modified sugar moiety and/or a modified nucleobase) and/or at least one modified internucleoside linkage).

[0205] A. Certain Modified Nucleosides

[0206] Modified nucleosides comprise a modified sugar moiety or a modified nucleobase or both a modifed sugar moiety and a modified nucleobase.

[0207] 1. Certain Sugar Moieties

[0208] In certain embodiments, modified sugar moieties are non-bicyclic modified sugar moieties. In certain embodiments, modified sugar moieties are bicyclic or tricyclic sugar moieties. In certain embodiments, modified sugar moieties are sugar surrogates. Such sugar surrogates may comprise one or more substitutions corresponding to those of other types of modified sugar moieties.

[0209] In certain embodiments, modified sugar moieties are non-bicyclic modified sugar moieties comprising a furanosyl ring with one or more acyclic substituent, including but not limited to substituents at the 2′, 4′, and/or 5′ positions. In certain embodiments one or more acyclic substituent of non-bicyclic modified sugar moieties is branched. Examples of 2′-substituent groups suitable for non-bicyclic modified sugar moieties include but are not limited to: 2′-O—(N-alkyl acetamide), e.g., 2′-O—(N-methyl acetamide). For example, see U.S. Pat. No. 6,147,200 and Prakash et al., Org. Lett., 5, 403-6 (2003).

[0210] In certain embodiments, 2′-substituent groups are selected from among: 2′-F, 2′-OCH₃ (“OMe” or “O-methyl”), 2′-O(CH₂)₂OCH₃ (“MOE”), halo, allyl, amino, azido, SH, CN, OCN, CF₃, OCF₃, O—C₁-C₁₀ alkoxy, O—C₁-C₁₀ substituted alkoxy, O—C₁-C₁₀ alkyl, O—C₁-C₁₀ substituted alkyl, S-alkyl, N(Rₘ)-alkyl, O-alkenyl, S-alkenyl, N(Rₘ)-alkenyl, O-alkynyl, S-alkynyl, N(Rₘ)-alkynyl, O-alkylenyl-O-alkyl, alkynyl, alkaryl, aralkyl, O-alkaryl, O-aralkyl, O(CH₂)₂SCH₃, O(CH₂)₂ON(Rₘ)(Rₙ) or OCH₂C(═O)—N(Rₘ)(Rₙ), where each Rₘ and Rₙ is, independently, H, an amino protecting group, or substituted or unsubstituted C₁-C₁₀ alkyl, and the 2′-substituent groups described in Cook et al., U.S. Pat. No. 6,531,584; Cook et al., U.S. Pat. No. 5,859,221; and Cook et al., U.S. Pat. No. 6,005,087. Certain embodiments of these 2′-substituent groups can be further substituted with one or more substituent groups independently selected from among: hydroxyl, amino, alkoxy, carboxy, benzyl, phenyl, nitro (NO₂), thiol, thioalkoxy, thioalkyl, halogen, alkyl, aryl, alkenyl and alkynyl. Examples of 4′-substituent groups suitable for non-bicyclic modified sugar moieties include but are not limited to alkoxy (e.g., methoxy), alkyl, and those described in Manoharan et al., WO 2015/106128. Examples of 5′-substituent groups suitable for non-bicyclic modified sugar moieties include but are not limited to: 5′-methyl (R or S), 5′-vinyl, and 5′-methoxy. In certain embodiments, non-bicyclic modified sugars comprise more than one non-bridging sugar substituent, for example, 2′-F-5′-methyl sugar moieties and the modified sugar moieties and modified nucleosides described in Migawa et al., WO 2008/101157 and Rajeev et al., US2013/0203836.).

[0211] In certain embodiments, a 2′-substituted nucleoside or 2′-non-bicyclic modified nucleoside comprises a sugar moiety comprising a non-bridging 2′-substituent group selected from: F, NH₂, N₃, OCF₃, OCH₃, O(CH₂)₃NH₂, CH₂CH═CH₂, OCH₂CH═CH₂, OCH₂CH₂OCH₃, O(CH₂)₂SCH₃, O(CH₂)₂ON(Rₘ)(Rₙ), O(CH₂)₂O(CH₂)₂N(CH₃)₂, and N-substituted acetamide (OCH₂C(═O)—N(Rₘ)(Rₙ)), where each Rₘ and Rₙ is, independently, H, an amino protecting group, or substituted or unsubstituted C₁-C₁₀ alkyl. In certain embodiments, each Rₘ and Rₙ is, independently, H or C₁-C₃ alkyl. In certain embodiments, each Rₘ and Rₙ is, independently, H or methyl.

[0212] In certain embodiments, a 2′-substituted nucleoside or 2′-non-bicyclic modified nucleoside comprises a sugar moiety comprising a non-bridging 2′-substituent group selected from: F, OCF₃, OCH₃, OCH₂CH₂OCH₃, O(CH₂)₂SCH₃, O(CH₂)₂ON(CH₃)₂, O(CH₂)₂O(CH₂)₂N(CH₃)₂, and OCH₂C(═O)—N(H)CH₃.

[0213] In certain embodiments, a 2′-substituted nucleoside or 2′-non-bicyclic modified nucleoside comprises a sugar moiety comprising a non-bridging 2′-substituent group selected from: F, OCH₃, OCH₂CH₂OCH₃, and OCH₂C(═O)—N(H)CH₃.

[0214] Nucleosides comprising modified sugar moieties, such as non-bicyclic modified sugar moieties, may be referred to by the position(s) of the substitution(s) on the sugar moiety of the nucleoside. For example, nucleosides comprising 2′-substituted or 2-modified sugar moieties are referred to as 2′-substituted nucleosides or 2-modified nucleosides.

[0215] Certain modifed sugar moieties comprise a bridging sugar substituent that forms a second ring resulting in a bicyclic sugar moiety. In certain such embodiments, the bicyclic sugar moiety comprises a bridge between the 4′ and the 2′ furanose ring atoms. In certain such embodiments, the furanose ring is a ribose ring. Examples of such 4′ to 2′ bridging sugar substituents include but are not limited to: 4′-CH₂-2′, 4′-(CH₂)₂-2′, 4′-(CH₂)₃-2′, 4′-CH₂—O-2′ (“LNA”), 4′-CH₂—S-2′, 4′-(CH₂)₂—O-2′ (“ENA”), 4′-CH(CH₃)—O-2′ (referred to as “constrained ethyl” or “cEt” when in the S configuration), 4′-CH₂—O—CH₂-2′, 4′-CH₂—N(R)-2′, 4′-CH(CH₂OCH₃)—O-2′ (“constrained MOE” or “cMOE”) and analogs thereof (see, e.g., Seth et al., U.S. Pat. No. 7,399,845, Bhat et al., U.S. Pat. No. 7,569,686, Swayze et al., U.S. Pat. No. 7,741,457, and Swayze et al., U.S. Pat. No. 8,022,193), 4′-C(CH₃)(CH₃)—O-2′ and analogs thereof (see, e.g., Seth et al., U.S. Pat. No. 8,278,283), 4′-CH₂—N(OCH₃)-2′ and analogs thereof (see, e.g., Prakash et al., U.S. Pat. No. 8,278,425), 4′-CH₂—O—N(CH₃)-2′ (see, e.g., Allerson et al., U.S. Pat. No. 7,696,345 and Allerson et al., U.S. Pat. No. 8,124,745), 4′-CH₂—C(H)(CH₃)-2′ (see, e.g., Zhou, et al., J. Org. Chem., 2009, 74, 118-134), 4′-CH₂—C(═CH₂)-2′ and analogs thereof (see e.g., Seth et al., U.S. Pat. No. 8,278,426), 4′-C(RₐR_{b})—N(R)—O-2′, 4′-C(RₐR_{b})—O—N(R)-2′, 4′-CH₂—O—N(R)-2′, and 4′-CH₂—N(R)—O-2′, wherein each R, Rₐ, and R_{b} is, independently, H, a protecting group, or C₁-C₁₂ alkyl (see, e.g. Imanishi et al., U.S. Pat. No. 7,427,672).

[0216] In certain embodiments, such 4′ to 2′ bridges independently comprise from 1 to 4 linked groups independently selected from: —[C(Rₐ)(R_{b})]ₙ—, —[C(Rₐ)(R_{b})]ₙ—O—, —C(R)═C(R_{b})—, —C(R)═N—, —C(═NRₐ)—, —C(═O)—, —C(═S)—, —O—, —Si(Rₐ)₂—, —S(═O)ₓ—, and —N(Rₐ)—;

[0217] wherein:

[0218] x is 0, 1, or 2;

[0219] n is 1, 2, 3, or 4;

[0220] each Rₐ and R_{b} is, independently, H, a protecting group, hydroxyl, C₁-C₁₂ alkyl, substituted C₁-C₁₂ alkyl, C₂-C₁₂ alkenyl, substituted C₂-C₁₂ alkenyl, C₂-C₁₂ alkynyl, substituted C₂-C₁₂ alkynyl, C₅-C₂₀ aryl, substituted C₅-C₂₀ aryl, heterocycle radical, substituted heterocycle radical, heteroaryl, substituted heteroaryl, C₅-C₇ alicyclic radical, substituted C₅-C₇ alicyclic radical, halogen, OJ₁, NJ₁J₂, SJ₁, N₃, COOJ₁, acyl (C(═O)—H), substituted acyl, CN, sulfonyl (S(═O)₂-J₁), or sulfoxyl (S(═O)-J₁); and

[0221] each J₁ and J₂ is, independently, H, C₁-C₁₂ alkyl, substituted C₁-C₁₂ alkyl, C₂-C₁₂ alkenyl, substituted C₂-C₁₂ alkenyl, C₂-C₁₂ alkynyl, substituted C₂-C₁₂ alkynyl, C₅-C₂₀ aryl, substituted C₅-C₂₀ aryl, acyl (C(═O)—H), substituted acyl, a heterocycle radical, a substituted heterocycle radical, C₁-C₁₂ aminoalkyl, substituted C₁-C₁₂ aminoalkyl, or a protecting group.

[0222] Additional bicyclic sugar moieties are known in the art, see, for example: Freier et al., Nucleic Acids Research, 1997, 25(22), 4429-4443, Albaek et al., J. Org. Chem., 2006, 71, 7731-7740, Singh et al., Chem. Commun., 1998, 4, 455-456; Koshkin et al., Tetrahedron, 1998, 54, 3607-3630; Kumar et al., Bioorg. Med. Chem. Lett., 1998, 8, 2219-2222; Singh et al., J. Org. Chem., 1998, 63, 10035-10039; Srivastava et al., J. Am. Chem. Soc., 20017, 129, 8362-8379; Wengel et a., U.S. Pat. No. 7,053,207; Imanishi et al., U.S. Pat. No. 6,268,490; Imanishi et al. U.S. Pat. No. 6,770,748; Imanishi et al., U.S. RE44,779; Wengel et al., U.S. Pat. No. 6,794,499; Wengel et al., U.S. Pat. No. 6,670,461; Wengel et al., U.S. Pat. No. 7,034,133; Wengel et al., U.S. Pat. No. 8,080,644; Wengel et al., U.S. Pat. No. 8,034,909; Wengel et al., U.S. Pat. No. 8,153,365; Wengel et al., U.S. Pat. No. 7,572,582; and Ramasamy et al., U.S. Pat. No. 6,525,191; Torsten et al., WO 2004/106356; Wengel et al., WO 1999/014226; Seth et al., WO 2007/134181; Seth et al., U.S. Pat. No. 7,547,684; Seth et al., U.S. Pat. No. 7,666,854; Seth et al., U.S. Pat. No. 8,088,746; Seth et al., U.S. Pat. No. 7,750,131; Seth et al., U.S. Pat. No. 8,030,467; Seth et al., U.S. Pat. No. 8,268,980; Seth et al., U.S. Pat. No. 8,546,556; Seth et al., U.S. Pat. No. 8,530,640; Migawa et al., U.S. Pat. No. 9,012,421; Seth et al., U.S. Pat. No. 8,501,805; and U.S. Patent Publication Nos. Allerson et al., US2008/0039618 and Migawa et al., US2015/0191727.

[0223] In certain embodiments, bicyclic sugar moieties and nucleosides incorporating such bicyclic sugar moieties are further defined by isomeric configuration. For example, an LNA nucleoside (described herein) may be in the α-L configuration or in the β-D configuration.

[chemical structure]

α-L-methyleneoxy (4′-CH₂—O-2′) or α-L-LNA bicyclic nucleosides have been incorporated into antisense oligonucleotides that showed antisense activity (Frieden et al., Nucleic Acids Research, 2003, 21, 6365-6372). Herein, general descriptions of bicyclic nucleosides include both isomeric configurations. When the positions of specific bicyclic nucleosides (e.g., LNA or cEt) are identified in exemplified embodiments herein, they are in the β-D configuration, unless otherwise specified.

[0224] In certain embodiments, modified sugar moieties comprise one or more non-bridging sugar substituent and one or more bridging sugar substituent (e.g., 5′-substituted and 4′-2′ bridged sugars).

[0225] In certain embodiments, modified sugar moieties are sugar surrogates. In certain such embodiments, the oxygen atom of the sugar moiety is replaced, e.g., with a sulfur, carbon or nitrogen atom. In certain such embodiments, such modified sugar moieties also comprise bridging and/or non-bridging substituents as described herein. For example, certain sugar surrogates comprise a 4′-sulfur atom and a substitution at the 2′-position (see, e.g., Bhat et al., U.S. Pat. No. 7,875,733 and Bhat et al., U.S. Pat. No. 7,939,677) and/or the 5′ position.

[0226] In certain embodiments, sugar surrogates comprise rings having other than 5 atoms. For example, in certain embodiments, a sugar surrogate comprises a six-membered tetrahydropyran (“THP”). Such tetrahydropyrans may be further modified or substituted. Nucleosides comprising such modified tetrahydropyrans include but are not limited to hexitol nucleic acid (“HNA”), anitol nucleic acid (“ANA”), manitol nucleic acid (“MNA”) (see, e.g., Leumann, C J. Bioorg. &Med. Chem. 2002, 10, 841-854), fluoro HNA:

[chemical structure]

(“F-HNA”, see e.g. Swayze et al., U.S. Pat. No. 8,088,904; Swayze et al., U.S. Pat. No. 8,440,803; Swayze et al., U.S. Pat. No. 8,796,437; and Swayze et al., U.S. Pat. No. 9,005,906; F-HNA can also be referred to as a F-THP or 3′-fluoro tetrahydropyran), and nucleosides comprising additional modified THP compounds having the formula:

[chemical structure]

wherein, independently, for each of said modified THP nucleoside:

[0227] Bx is a nucleobase moiety;

[0228] T₃ and T₄ are each, independently, an internucleoside linking group linking the modified THP nucleoside to the remainder of an oligonucleotide or one of T₃ and T₄ is an internucleoside linking group linking the modified THP nucleoside to the remainder of an oligonucleotide and the other of T₃ and T₄ is H, a hydroxyl protecting group, a linked conjugate group, or a 5′ or 3′-terminal group; q₁, q₂, q₃, q₄, q₅, q₆ and q₇ are each, independently, H, C₁-C₆ alkyl, substituted C₁-C₆ alkyl, C₂-C₆ alkenyl, substituted C₂-C₆ alkenyl, C₂-C₆ alkynyl, or substituted C₂-C₆ alkynyl; and

[0229] each of R₁ and R₂ is independently selected from among: hydrogen, halogen, substituted or unsubstituted alkoxy, NJ₁J₂, SJ₁, N₃, OC(═X)J₁, OC(═X)NJ₁J₂, NJ₃C(═X)NJ₁J₂, and CN, wherein X is O, S or NJ₁, and each J₁, J₂, and J₃ is, independently, H or C₁-C₆ alkyl.

[0230] In certain embodiments, modified THP nucleosides are provided wherein q₁, q₂, q₃, q₄, q₅, q₆ and q₇ are each H. In certain embodiments, at least one of q₁, q₂, q₃, q₄, q₅, q₆ and q₇ is other than H. In certain embodiments, at least one of q₁, q₂, q₃, q₄, q₅, q₆ and q₇ is methyl. In certain embodiments, modified THP nucleosides are provided wherein one of R₁ and R₂ is F. In certain embodiments, R₁ is F and R₂ is H, in certain embodiments, R₁ is methoxy and R₂ is H, and in certain embodiments, R₁ is methoxyethoxy and R₂ is H.

[0231] In certain embodiments, sugar surrogates comprise rings having more than 5 atoms and more than one heteroatom. For example, nucleosides comprising morpholino sugar moieties and their use in oligonucleotides have been reported (see, e.g., Braasch et al., Biochemistry, 2002, 41, 4503-4510 and Summerton et al., U.S. Pat. No. 5,698,685; Summerton et al., U.S. Pat. No. 5,166,315; Summerton et al., U.S. Pat. No. 5,185,444; and Summerton et al., U.S. Pat. No. 5,034,506). As used here, the term “morpholino” means a sugar surrogate having the following structure:

[chemical structure]

In certain embodiments, morpholinos may be modified, for example by adding or altering various substituent groups from the above morpholino structure. Such sugar surrogates are refered to herein as “modifed morpholinos.”

[0232] In certain embodiments, sugar surrogates comprise acyclic moieites. Examples of nucleosides and oligonucleotides comprising such acyclic sugar surrogates include but are not limited to: peptide nucleic acid (“PNA”), acyclic butyl nucleic acid (see, e.g., Kumar et al., Org. Biomol. Chem., 2013, 11, 5853-5865), and nucleosides and oligonucleotides described in Manoharan et al., WO2011/133876.

[0233] Many other bicyclic and tricyclic sugar and sugar surrogate ring systems are known in the art that can be used in modified nucleosides).

[0234] 2. Certain Modified Nucleobases

[0235] In certain embodiments, modified oligonucleotides comprise one or more nucleoside comprising an unmodified nucleobase. In certain embodiments, modified oligonucleotides comprise one or more nucleoside comprising a modified nucleobase.

[0236] In certain embodiments, modified nucleobases are selected from: 5-substituted pyrimidines, 6-azapyrimidines, alkyl or alkynyl substituted pyrimidines, alkyl substituted purines, and N-2, N-6 and O-6 substituted purines. In certain embodiments, modified nucleobases are selected from: 2-aminopropyladenine, 5-hydroxymethyl cytosine, xanthine, hypoxanthine, 2-aminoadenine, 6-N-methylguanine, 6-N-methyladenine, 2-propyladenine, 2-thiouracil, 2-thiothymine and 2-thiocytosine, 5-propynyl (—C≡C—CH₃) uracil, 5-propynylcytosine, 6-azouracil, 6-azocytosine, 6-azothymine, 5-ribosyluracil (pseudouracil), 4-thiouracil, 8-halo, 8-amino, 8-thiol, 8-thioalkyl, 8-hydroxyl, 8-aza and other 8-substituted purines, 5-halo, particularly 5-bromo, 5-trifluoromethyl, 5-halouracil, and 5-halocytosine, 7-methylguanine, 7-methyladenine, 2-F-adenine, 2-aminoadenine, 7-deazaguanine, 7-deazaadenine, 3-deazaguanine, 3-deazaadenine, 6-N-benzoyladenine, 2-N-isobutyrylguanine, 4-N-benzoylcytosine, 4-N-benzoyluracil, 5-methyl 4-N-benzoylcytosine, 5-methyl 4-N-benzoyluracil, universal bases, hydrophobic bases, promiscuous bases, size-expanded bases, and fluorinated bases. Further modified nucleobases include tricyclic pyrimidines, such as 1,3-diazaphenoxazine-2-one, 1,3-diazaphenothiazine-2-one and 9-(2-aminoethoxy)-1,3-diazaphenoxazine-2-one (G-clamp). Modified nucleobases may also include those in which the purine or pyrimidine base is replaced with other heterocycles, for example 7-deaza-adenine, 7-deazaguanosine, 2-aminopyridine and 2-pyridone. Further nucleobases include those disclosed in Merigan et al., U.S. Pat. No. 3,687,808, those disclosed in The Concise Encyclopedia Of Polymer Science And Engineering, Kroschwitz, J. I., Ed., John Wiley & Sons, 1990, 858-859; Englisch et al., Angewandte Chemie, International Edition, 1991, 30, 613; Sanghvi, Y. S., Chapter 15, Antisense Research and Applications, Crooke, S. T. and Lebleu, B., Eds., CRC Press, 1993, 273-288; and those disclosed in Chapters 6 and 15, Antisense Drug Technology, Crooke S. T., Ed., CRC Press, 2008, 163-166 and 442-443.

[0237] Publications that teach the preparation of certain of the above noted modified nucleobases as well as other modified nucleobases include without limitation, Manoharan et al., US2003/0158403; Manoharan et al., US2003/0175906; Dinh et al., U.S. Pat. No. 4,845,205; Spielvogel et al., U.S. Pat. No. 5,130,302; Rogers et al., U.S. Pat. No. 5,134,066; Bischofberger et al., U.S. Pat. No. 5,175,273; Urdea et al., U.S. Pat. No. 5,367,066; Benner et al., U.S. Pat. No. 5,432,272; Matteucci et al., U.S. Pat. No. 5,434,257; Gmeiner et al., U.S. Pat. No. 5,457,187; Cook et al., U.S. Pat. No. 5,459,255; Froehler et al., U.S. Pat. No. 5,484,908; Matteucci et al., U.S. Pat. No. 5,502,177; Hawkins et al., U.S. Pat. No. 5,525,711; Haralambidis et al., U.S. Pat. No. 5,552,540; Cook et al., U.S. Pat. No. 5,587,469; Froehler et al., U.S. Pat. No. 5,594,121; Switzer et al., U.S. Pat. No. 5,596,091; Cook et al., U.S. Pat. No. 5,614,617; Froehler et al., U.S. Pat. No. 5,645,985; Cook et al., U.S. Pat. No. 5,681,941; Cook et al., U.S. Pat. No. 5,811,534; Cook et al., U.S. Pat. No. 5,750,692; Cook et al., U.S. Pat. No. 5,948,903; Cook et al., U.S. Pat. No. 5,587,470; Cook et al., U.S. Pat. No. 5,457,191; Matteucci et al., U.S. Pat. No. 5,763,588; Froehler et al., U.S. Pat. No. 5,830,653; Cook et al., U.S. Pat. No. 5,808,027; Cook et al., U.S. Pat. No. 6,166,199; and Matteucci et al., U.S. Pat. No. 6,005,096.

[0238] B. Certain Modified Internucleoside Linkages

[0239] In certain embodiments, nucleosides of modified oligonucleotides may be linked together using any internucleoside linkage. The two main classes of internucleoside linking groups are defined by the presence or absence of a phosphorus atom. Representative phosphorus-containing internucleoside linkages include but are not limited to phosphates, which contain a phosphodiester bond (“P═O”) (also referred to as unmodified or naturally occurring linkages), phosphotriesters, methylphosphonates, phosphoramidates, and phosphorothioates (“P═S”), and phosphorodithioates (“HS—P═S”). Representative non-phosphorus containing internucleoside linking groups include but are not limited to methylenemethylimino (—CH₂—N(CH₃)—O—CH₂—), thiodiester, thionocarbamate (—O—C(═O)(NH)—S—); siloxane (—O—SiH₂—O—); and N,N′-dimethylhydrazine (—CH₂—N(CH₃)—N(CH₃)—). Modified internucleoside linkages, compared to naturally occurring phosphate linkages, can be used to alter, typically increase, nuclease resistance of the oligonucleotide. In certain embodiments, internucleoside linkages having a chiral atom can be prepared as a racemic mixture, or as separate enantiomers. Representative chiral internucleoside linkages include but are not limited to alkylphosphonates and phosphorothioates. Methods of preparation of phosphorous-containing and non-phosphorous-containing internucleoside linkages are well known to those skilled in the art.

[0240] Neutral internucleoside linkages include, without limitation, phosphotriesters, methylphosphonates, MMI (3′-CH₂—N(CH₃)—O-5′), amide-3 (3′-CH₂—C(═O)—N(H)-5′), amide-4 (3′-CH₂—N(H)—C(═O)-5′), formacetal (3′-O—CH₂—O-5′), methoxypropyl, and thioformacetal (3′-S—CH₂—O-5′). Further neutral internucleoside linkages include nonionic linkages comprising siloxane (dialkylsiloxane), carboxylate ester, carboxamide, sulfide, sulfonate ester and amides (See for example: Carbohydrate Modifications in Antisense Research; Y. S. Sanghvi and P. D. Cook, Eds., ACS Symposium Series 580; Chapters 3 and 4, 40-65). Further neutral internucleoside linkages include nonionic linkages comprising mixed N, O, S and CH₂ component parts.

[0241] C. Certain Motifs

[0242] In certain embodiments, modified oligonucleotides comprise one or more modified nucleoside comprising a modified sugar. In certain embodiments, modified oligonucleotides comprise one or more modified nucleosides comprising a modified nucleobase. In certain embodiments, modified oligonucleotides comprise one or more modified internucleoside linkage. In such embodiments, the modified, unmodified, and differently modified sugar moieties, nucleobases, and/or internucleoside linkages of a modified oligonucleotide define a pattern or motif. In certain embodiments, the patterns of sugar moieties, nucleobases, and internucleoside linkages are each independent of one another. Thus, a modified oligonucleotide may be described by its sugar motif, nucleobase motif and/or internucleoside linkage motif (as used herein, nucleobase motif describes the modifications to the nucleobases independent of the sequence of nucleobases).

[0243] 1. Certain Sugar Motifs

[0244] In certain embodiments, oligonucleotides comprise one or more type of modified sugar and/or unmodified sugar moiety arranged along the oligonucleotide or region thereof in a defined pattern or sugar motif. In certain instances, such sugar motifs include but are not limited to any of the sugar modifications discussed herein.

[0245] In certain embodiments, modified oligonucleotides comprise or consist of a region having a gapmer motif, which comprises two external regions or “wings” and a central or internal region or “gap.” The three regions of a gapmer motif (the 5′-wing, the gap, and the 3′-wing) form a contiguous sequence of nucleosides wherein at least some of the sugar moieties of the nucleosides of each of the wings differ from at least some of the sugar moieties of the nucleosides of the gap. Specifically, at least the sugar moieties of the nucleosides of each wing that are closest to the gap (the 3′-most nucleoside of the 5′-wing and the 5′-most nucleoside of the 3′-wing) are modified sugar moieties and differ from the sugar moieties of the neighboring gap nucleosides, which are unmodified sugar moieties, thus defining the boundary between the wings and the gap (i.e., the wing/gap junction). In certain embodiments, the sugar moieties within the gap are the same as one another. In certain embodiments, the gap includes one or more nucleoside having a sugar moiety that differs from the sugar moiety of one or more other nucleosides of the gap. In certain embodiments, the sugar motifs of the two wings are the same as one another (symmetric gapmer). In certain embodiments, the sugar motif of the 5′-wing differs from the sugar motif of the 3′-wing (asymmetric gapmer).

[0246] In certain embodiments, the wings of a gapmer comprise 1-5 nucleosides. In certain embodiments, the wings of a gapmer comprise 2-5 nucleosides. In certain embodiments, the wings of a gapmer comprise 3-5 nucleosides. In certain embodiments, the nucleosides of a gapmer are all modified nucleosides.

[0247] In certain embodiments, the gap of a gapmer comprises 7-12 nucleosides. In certain embodiments, the gap of a gapmer comprises 7-10 nucleosides. In certain embodiments, the gap of a gapmer comprises 8-10 nucleosides. In certain embodiments, the gap of a gapmer comprises 10 nucleosides. In certain embodiment, each nucleoside of the gap of a gapmer is an unmodified 2′-deoxy nucleoside.

[0248] In certain embodiments, the gapmer is a deoxy gapmer. In such embodiments, the nucleosides on the gap side of each wing/gap junction are unmodified 2′-deoxy nucleosides and the nucleosides on the wing sides of each wing/gap junction are modified nucleosides. In certain such embodiments, each nucleoside of the gap is an unmodified 2′-deoxy nucleoside. In certain such embodiments, each nucleoside of each wing is a modified nucleoside.

[0249] In certain embodiments, modified oligonucleotides comprise or consist of a region having a fully modified sugar motif. In such embodiments, each nucleoside of the fully modified region of the modified oligonucleotide comprises a modified sugar moiety. In certain such embodiments, each nucleoside in the entire modified oligonucleotide comprises a modified sugar moiety. In certain embodiments, modified oligonucleotides comprise or consist of a region having a fully modified sugar motif, wherein each nucleoside within the fully modified region comprises the same modified sugar moiety, referred to herein as a uniformly modified sugar motif. In certain embodiments, a fully modified oligonucleotide is a uniformly modified oligonucleotide. In certain embodiments, each nucleoside of a uniformly modified oligonucleotide comprises the same 2′-modification. In certain embodiments, each nucleoside of a uniformly modified oligonucleotide comprises a 2′-O—(N-alkyl acetamide) group. In certain embodiments, each nucleoside of a uniformly modified oligonucleotide comprises a 2′-O—(N-methyl acetamide) group.

[0250] 2. Certain Nucleobase Motifs

[0251] In certain embodiments, oligonucleotides comprise modified and/or unmodified nucleobases arranged along the oligonucleotide or region thereof in a defined pattern or motif. In certain embodiments, each nucleobase is modified. In certain embodiments, none of the nucleobases are modified. In certain embodiments, each purine or each pyrimidine is modified. In certain embodiments, each adenine is modified. In certain embodiments, each guanine is modified. In certain embodiments, each thymine is modified. In certain embodiments, each uracil is modified. In certain embodiments, each cytosine is modified. In certain embodiments, some or all of the cytosine nucleobases in a modified oligonucleotide are 5-methylcytosines.

[0252] In certain embodiments, modified oligonucleotides comprise a block of modified nucleobases. In certain such embodiments, the block is at the 3′-end of the oligonucleotide. In certain embodiments the block is within 3 nucleosides of the 3′-end of the oligonucleotide. In certain embodiments, the block is at the 5′-end of the oligonucleotide. In certain embodiments the block is within 3 nucleosides of the 5′-end of the oligonucleotide.

[0253] In certain embodiments, oligonucleotides having a gapmer motif comprise a nucleoside comprising a modified nucleobase. In certain such embodiments, one nucleoside comprising a modified nucleobase is in the central gap of an oligonucleotide having a gapmer motif. In certain such embodiments, the sugar moiety of said nucleoside is a 2′-deoxyribosyl moiety. In certain embodiments, the modified nucleobase is selected from: a 2-thiopyrimidine and a 5-propynepyrimidine.

[0254] 3. Certain Internucleoside Linkage Motifs

[0255] In certain embodiments, oligonucleotides comprise modified and/or unmodified internucleoside linkages arranged along the oligonucleotide or region thereof in a defined pattern or motif. In certain embodiments, essentially each internucleoside linking group is a phosphate internucleoside linkage (P═O). In certain embodiments, each internucleoside linking group of a modified oligonucleotide is a phosphorothioate (P═S). In certain embodiments, each internucleoside linking group of a modified oligonucleotide is independently selected from a phosphorothioate and phosphate internucleoside linkage. In certain embodiments, the sugar motif of a modified oligonucleotide is a gapmer and the internucleoside linkages within the gap are all modified. In certain such embodiments, some or all of the internucleoside linkages in the wings are unmodified phosphate linkages. In certain embodiments, the terminal internucleoside linkages are modified.

[0256] D. Certain Lengths

[0257] In certain embodiments, oligonucleotides (including modified oligonucleotides) can have any of a variety of ranges of lengths. In certain embodiments, oligonucleotides consist of X to Y linked nucleosides, where X represents the fewest number of nucleosides in the range and Y represents the largest number nucleosides in the range. In certain such embodiments, X and Y are each independently selected from 8, 9, 10, 11, 12, 13, 14, 15, 16, 17, 18, 19, 20, 21, 22, 23, 24, 25, 26, 27, 28, 29, 30, 31, 32, 33, 34, 35, 36, 37, 38, 39, 40, 41, 42, 43, 44, 45, 46, 47, 48, 49, and 50; provided that X≤Y. For example, in certain embodiments, oligonucleotides consist of 12 to 13, 12 to 14, 12 to 15, 12 to 16, 12 to 17, 12 to 18, 12 to 19, 12 to 20, 12 to 21, 12 to 22, 12 to 23, 12 to 24, 12 to 25, 12 to 26, 12 to 27, 12 to 28, 12 to 29, 12 to 30, 13 to 14, 13 to 15, 13 to 16, 13 to 17, 13 to 18, 13 to 19, 13 to 20, 13 to 21, 13 to 22, 13 to 23, 13 to 24, 13 to 25, 13 to 26, 13 to 27, 13 to 28, 13 to 29, 13 to 30, 14 to 15, 14 to 16, 14 to 17, 14 to 18, 14 to 19, 14 to 20, 14 to 21, 14 to 22, 14 to 23, 14 to 24, 14 to 25, 14 to 26, 14 to 27, 14 to 28, 14 to 29, 14 to 30, 15 to 16, 15 to 17, 15 to 18, 15 to 19, 15 to 20, 15 to 21, 15 to 22, 15 to 23, 15 to 24, 15 to 25, 15 to 26, 15 to 27, 15 to 28, 15 to 29, 15 to 30, 16 to 17, 16 to 18, 16 to 19, 16 to 20, 16 to 21, 16 to 22, 16 to 23, 16 to 24, 16 to 25, 16 to 26, 16 to 27, 16 to 28, 16 to 29, 16 to 30, 17 to 18, 17 to 19, 17 to 20, 17 to 21, 17 to 22, 17 to 23, 17 to 24, 17 to 25, 17 to 26, 17 to 27, 17 to 28, 17 to 29, 17 to 30, 18 to 19, 18 to 20, 18 to 21, 18 to 22, 18 to 23, 18 to 24, 18 to 25, 18 to 26, 18 to 27, 18 to 28, 18 to 29, 18 to 30, 19 to 20, 19 to 21, 19 to 22, 19 to 23, 19 to 24, 19 to 25, 19 to 26, 19 to 29, 19 to 28, 19 to 29, 19 to 30, 20 to 21, 20 to 22, 20 to 23, 20 to 24, 20 to 25, 20 to 26, 20 to 27, 20 to 28, 20 to 29, 20 to 30, 21 to 22, 21 to 23, 21 to 24, 21 to 25, 21 to 26, 21 to 27, 21 to 28, 21 to 29, 21 to 30, 22 to 23, 22 to 24, 22 to 25, 22 to 26, 22 to 27, 22 to 28, 22 to 29, 22 to 30, 23 to 24, 23 to 25, 23 to 26, 23 to 27, 23 to 28, 23 to 29, 23 to 30, 24 to 25, 24 to 26, 24 to 27, 24 to 28, 24 to 29, 24 to 30, 25 to 26, 25 to 27, 25 to 28, 25 to 29, 25 to 30, 26 to 27, 26 to 28, 26 to 29, 26 to 30, 27 to 28, 27 to 29, 27 to 30, 28 to 29, 28 to 30, or 29 to 30 linked nucleosides

[0258] E. Certain Modified Oligonucleotides

[0259] In certain embodiments, the above modifications (sugar, nucleobase, internucleoside linkage) are incorporated into a modified oligonucleotide. In certain embodiments, modified oligonucleotides are characterized by their modification motifs and overall lengths. In certain embodiments, such parameters are each independent of one another. Thus, unless otherwise indicated, each internucleoside linkage of an oligonucleotide having a gapmer sugar motif may be modified or unmodified and may or may not follow the gapmer modification pattern of the sugar modifications. For example, the internucleoside linkages within the wing regions of a sugar gapmer may be the same or different from one another and may be the same or different from the internucleoside linkages of the gap region of the sugar motif. Likewise, such sugar gapmer oligonucleotides may comprise one or more modified nucleobase independent of the gapmer pattern of the sugar modifications. Furthermore, in certain instances, an oligonucleotide is described by an overall length or range and by lengths or length ranges of two or more regions (e.g., a regions of nucleosides having specified sugar modifications), in such circumstances it may be possible to select numbers for each range that result in an oligonucleotide having an overall length falling outside the specified range. In such circumstances, both elements must be satisfied. For example, in certain embodiments, a modified oligonucleotide consists if of 15-20 linked nucleosides and has a sugar motif consisting of three regions, A, B, and C, wherein region A consists of 2-6 linked nucleosides having a specified sugar motif, region B consists of 6-10 linked nucleosides having a specified sugar motif, and region C consists of 2-6 linked nucleosides having a specified sugar motif. Such embodiments do not include modified oligonucleotides where A and C each consist of 6 linked nucleosides and B consists of 10 linked nucleosides (even though those numbers of nucleosides are permitted within the requirements for A, B, and C) because the overall length of such oligonucleotide is 22, which exceeds the upper limit of the overall length of the modified oligonucleotide (20). Herein, if a description of an oligonucleotide is silent with respect to one or more parameter, such parameter is not limited. Thus, a modified oligonucleotide described only as having a gapmer sugar motif without further description may have any length, internucleoside linkage motif, and nucleobase motif. Unless otherwise indicated, all modifications are independent of nucleobase sequence.

[0260] F. Nucleobase Sequence

[0261] In certain embodiments, oligonucleotides (unmodified or modified oligonucleotides) are further described by their nucleobase sequence. In certain embodiments oligonucleotides have a nucleobase sequence that is complementary to a second oligonucleotide or an identified reference nucleic acid, such as a target precursor transcript. In certain such embodiments, a region of an oligonucleotide has a nucleobase sequence that is complementary to a second oligonucleotide or an identified reference nucleic acid, such as a target precursor transcript. In certain embodiments, the nucleobase sequence of a region or entire length of an oligonucleotide is at least 50%, at least 60%, at least 70%, at least 80%, at least 90%, at least 95%, or 100% complementary to the second oligonucleotide or nucleic acid, such as a target precursor transcript.

[0262] II. Certain Oligomeric Compounds

[0263] In certain embodiments, the invention provides oligomeric compounds, which consist of an oligonucleotide (modified or unmodified) and optionally one or more conjugate groups and/or terminal groups. Conjugate groups consist of one or more conjugate moiety and a conjugate linker which links the conjugate moiety to the oligonucleotide. Conjugate groups may be attached to either or both ends of an oligonucleotide and/or at any internal position. In certain embodiments, conjugate groups are attached to the 2′-position of a nucleoside of a modified oligonucleotide. In certain embodiments, conjugate groups that are attached to either or both ends of an oligonucleotide are terminal groups. In certain such embodiments, conjugate groups or terminal groups are attached at the 3′ and/or 5′-end of oligonucleotides. In certain such embodiments, conjugate groups (or terminal groups) are attached at the 3′-end of oligonucleotides. In certain embodiments, conjugate groups are attached near the 3′-end of oligonucleotides. In certain embodiments, conjugate groups (or terminal groups) are attached at the 5′-end of oligonucleotides. In certain embodiments, conjugate groups are attached near the 5′-end of oligonucleotides.

[0264] Examples of terminal groups include but are not limited to conjugate groups, capping groups, phosphate moieties, protecting groups, abasic nucleosides, modified or unmodified nucleosides, and two or more nucleosides that are independently modified or unmodified.

[0265] A. Certain Conjugate Groups

[0266] In certain embodiments, oligonucleotides are covalently attached to one or more conjugate groups. In certain embodiments, conjugate groups modify one or more properties of the attached oligonucleotide, including but not limited to pharmacodynamics, pharmacokinetics, stability, binding, absorption, tissue distribution, cellular distribution, cellular uptake, charge and clearance. In certain embodiments, conjugate groups impart a new property on the attached oligonucleotide, e.g., fluorophores or reporter groups that enable detection of the oligonucleotide. Certain conjugate groups and conjugate moieties have been described previously, for example: cholesterol moiety (Letsinger et al., Proc. Natl. Acad. Sci. USA, 1989, 86, 6553-6556), cholic acid (Manoharan et al., Bioorg. Med. Chem. Lett., 1994, 4, 1053-1060), a thioether, e.g., hexyl-S-tritylthiol (Manoharan et al., Ann. N.Y. Acad. Sci., 1992, 660, 306-309; Manoharan et al., Bioorg. Med. Chem. Lett., 1993, 3, 2765-2770), a thiocholesterol (Oberhauser et al., Nucl. Acids Res., 1992, 20, 533-538), an aliphatic chain, e.g., do-decan-diol or undecyl residues (Saison-Behmoaras et al., EMBO J., 1991, 10, 1111-1118; Kabanov et al., FEBS Lett., 1990, 259, 327-330; Svinarchuk et al., Biochimie, 1993, 75, 49-54), a phospholipid, e.g., di-hexadecyl-rac-glycerol or triethyl-ammonium 1,2-di-O-hexadecyl-rac-glycero-3-H-phosphonate (Manoharan et al., Tetrahedron Lett., 1995, 36, 3651-3654; Shea et al., Nucl. Acids Res., 1990, 18, 3777-3783), a polyamine or a polyethylene glycol chain (Manoharan et al., Nucleosides & Nucleotides, 1995, 14, 969-973), or adamantane acetic acid, a palmityl moiety (Mishra et al., Biochim. Biophys. Acta, 1995, 1264, 229-237), an octadecylamine or hexylamino-carbonyl-oxycholesterol moiety (Crooke et al., J Pharmacol. Exp. Ther., 1996, 277, 923-937), a tocopherol group (Nishina et al., Molecular Therapy Nucleic Acids, 2015, 4, e220; and Nishina et al., Molecular Therapy, 2008, 16, 734-740), or a GalNAc cluster (e.g., WO2014/179620).

[0267] In certain embodiments, conjugate groups may be selected from any of a C22 alkyl, C20 alkyl, C16 alkyl, C10 alkyl, C21 alkyl, C19 alkyl, C18 alkyl, C15 alkyl, C14 alkyl, C13 alkyl, C12 alkyl, C11 alkyl, C9 alkyl, C8 alkyl, C7 alkyl, C6 alkyl, C5 alkyl, C22 alkenyl, C20 alkenyl, C16 alkenyl, C10 alkenyl, C21 alkenyl, C19 alkenyl, C18 alkenyl, C15 alkenyl, C14 alkenyl, C13 alkenyl, C12 alkenyl, C11 alkenyl, C9 alkenyl, C8 alkenyl, C7 alkenyl, C6 alkenyl, or C5 alkenyl.

[0268] In certain embodiments, conjugate groups may be selected from any of C22 alkyl, C20 alkyl, C16 alkyl, C10 alkyl, C21 alkyl, C19 alkyl, C18 alkyl, C15 alkyl, C14 alkyl, C13 alkyl, C12 alkyl, C11 alkyl, C9 alkyl, C8 alkyl, C7 alkyl, C6 alkyl, and C5 alkyl, where the alkyl chain has one or more unsaturated bonds.

[0269] 1. Conjugate Moieties

[0270] Conjugate moieties include, without limitation, intercalators, reporter molecules, polyamines, polyamides, peptides, carbohydrates (e.g., GalNAc), vitamin moieties, polyethylene glycols, thioethers, polyethers, cholesterols, thiocholesterols, cholic acid moieties, folate, lipids, lipophilic groups, phospholipids, biotin, phenazine, phenanthridine, anthraquinone, adamantane, acridine, fluoresceins, rhodamines, coumarins, fluorophores, and dyes.

[0271] In certain embodiments, a conjugate moiety comprises an active drug substance, for example, aspirin, warfarin, phenylbutazone, ibuprofen, suprofen, fen-bufen, ketoprofen, (S)-(+)-pranoprofen, carprofen, dansylsarcosine, 2,3,5-triiodobenzoic acid, fingolimod, flufenamic acid, folinic acid, a benzothiadiazide, chlorothiazide, a diazepine, indo-methicin, a barbiturate, a cephalosporin, a sulfa drug, an antidiabetic, an antibacterial or an antibiotic.

[0272] 2. Conjugate Linkers

[0273] Conjugate moieties are attached to oligonucleotides through conjugate linkers. In certain oligomeric compounds, the conjugate linker is a single chemical bond (i.e., the conjugate moiety is attached directly to an oligonucleotide through a single bond). In certain oligomeric compounds, a conjugate moiety is attached to an oligonucleotide via a more complex conjugate linker comprising one or more conjugate linker moieities, which are sub-units making up a conjugate linker. In certain embodiments, the conjugate linker comprises a chain structure, such as a hydrocarbyl chain, or an oligomer of repeating units such as ethylene glycol, nucleosides, or amino acid units.

[0274] In certain embodiments, a conjugate linker comprises one or more groups selected from alkyl, amino, oxo, amide, disulfide, polyethylene glycol, ether, thioether, and hydroxylamino. In certain such embodiments, the conjugate linker comprises groups selected from alkyl, amino, oxo, amide and ether groups. In certain embodiments, the conjugate linker comprises groups selected from alkyl and amide groups. In certain embodiments, the conjugate linker comprises groups selected from alkyl and ether groups. In certain embodiments, the conjugate linker comprises at least one phosphorus moiety. In certain embodiments, the conjugate linker comprises at least one phosphate group. In certain embodiments, the conjugate linker includes at least one neutral linking group.

[0275] In certain embodiments, conjugate linkers, including the conjugate linkers described above, are bifunctional linking moieties, e.g., those known in the art to be useful for attaching conjugate groups to parent compounds, such as the oligonucleotides provided herein. In general, a bifunctional linking moiety comprises at least two functional groups. One of the functional groups is selected to bind to a particular site on a parent compound and the other is selected to bind to a conjugate group. Examples of functional groups used in a bifunctional linking moiety include but are not limited to electrophiles for reacting with nucleophilic groups and nucleophiles for reacting with electrophilic groups. In certain embodiments, bifunctional linking moieties comprise one or more groups selected from amino, hydroxyl, carboxylic acid, thiol, alkyl, alkenyl, and alkynyl.

[0276] Examples of conjugate linkers include but are not limited to pyrrolidine, 8-amino-3,6-dioxaoctanoic acid (ADO), succinimidyl 4-(N-maleimidomethyl) cyclohexane-1-carboxylate (SMCC) and 6-aminohexanoic acid (AHEX or AHA). Other conjugate linkers include but are not limited to substituted or unsubstituted C₁-C₁₀ alkyl, substituted or unsubstituted C₂-C₁₀ alkenyl or substituted or unsubstituted C₂-C₁₀ alkynyl, wherein a nonlimiting list of preferred substituent groups includes hydroxyl, amino, alkoxy, carboxy, benzyl, phenyl, nitro, thiol, thioalkoxy, halogen, alkyl, aryl, alkenyl and alkynyl.

[0277] In certain embodiments, conjugate linkers comprise 1-10 linker-nucleosides. In certain embodiments, such linker-nucleosides are modified nucleosides. In certain embodiments such linker-nucleosides comprise a modified sugar moiety. In certain embodiments, linker-nucleosides are unmodified. In certain embodiments, linker-nucleosides comprise an optionally protected heterocyclic base selected from a purine, substituted purine, pyrimidine or substituted pyrimidine. In certain embodiments, a cleavable moiety is a nucleoside selected from uracil, thymine, cytosine, 4-N-benzoylcytosine, 5-methylcytosine, 4-N-benzoyl-5-methylcytosine, adenine, 6-N-benzoyladenine, guanine and 2-N-isobutyrylguanine. It is typically desirable for linker-nucleosides to be cleaved from the oligomeric compound after it reaches a target tissue. Accordingly, linker-nucleosides are typically linked to one another and to the remainder of the oligomeric compound through cleavable bonds. In certain embodiments, such cleavable bonds are phosphodiester bonds.

[0278] Herein, linker-nucleosides are not considered to be part of the oligonucleotide. Accordingly, in embodiments in which an oligomeric compound comprises an oligonucleotide consisting of a specified number or range of linked nucleosides and/or a specified percent complementarity to a reference nucleic acid and the oligomeric compound also comprises a conjugate group comprising a conjugate linker comprising linker-nucleosides, those linker-nucleosides are not counted toward the length of the oligonucleotide and are not used in determining the percent complementarity of the oligonucleotide for the reference nucleic acid. For example, an oligomeric compound may comprise (1) a modified oligonucleotide consisting of 8-30 nucleosides and (2) a conjugate group comprising 1-10 linker-nucleosides that are contiguous with the nucleosides of the modified oligonucleotide. The total number of contiguous linked nucleosides in such an oligomeric compound is more than 30. Alternatively, an oligomeric compound may comprise a modified oligonucleotide consisting of 8-30 nucleosides and no conjugate group. The total number of contiguous linked nucleosides in such an oligomeric compound is no more than 30. Unless otherwise indicated conjugate linkers comprise no more than 10 linker-nucleosides. In certain embodiments, conjugate linkers comprise no more than 5 linker-nucleosides. In certain embodiments, conjugate linkers comprise no more than 3 linker-nucleosides. In certain embodiments, conjugate linkers comprise no more than 2 linker-nucleosides. In certain embodiments, conjugate linkers comprise no more than 1 linker-nucleoside.

[0279] In certain embodiments, it is desirable for a conjugate group to be cleaved from the oligonucleotide. For example, in certain circumstances oligomeric compounds comprising a particular conjugate moiety are better taken up by a particular cell type, but once the oligomeric compound has been taken up, it is desirable that the conjugate group be cleaved to release the unconjugated or parent oligonucleotide. Thus, certain conjugate linkers may comprise one or more cleavable moieties. In certain embodiments, a cleavable moiety is a cleavable bond. In certain embodiments, a cleavable moiety is a group of atoms comprising at least one cleavable bond. In certain embodiments, a cleavable moiety comprises a group of atoms having one, two, three, four, or more than four cleavable bonds. In certain embodiments, a cleavable moiety is selectively cleaved inside a cell or subcellular compartment, such as a lysosome. In certain embodiments, a cleavable moiety is selectively cleaved by endogenous enzymes, such as nucleases.

[0280] In certain embodiments, a cleavable bond is selected from among: an amide, an ester, an ether, one or both esters of a phosphodiester, a phosphate ester, a carbamate, or a disulfide. In certain embodiments, a cleavable bond is one or both of the esters of a phosphodiester. In certain embodiments, a cleavable moiety comprises a phosphate or phosphodiester. In certain embodiments, the cleavable moiety is a phosphate linkage between an oligonucleotide and a conjugate moiety or conjugate group.

[0281] In certain embodiments, a cleavable moiety comprises or consists of one or more linker-nucleosides. In certain such embodiments, the one or more linker-nucleosides are linked to one another and/or to the remainder of the oligomeric compound through cleavable bonds. In certain embodiments, such cleavable bonds are unmodified phosphodiester bonds. In certain embodiments, a cleavable moiety is 2′-deoxy nucleoside that is attached to either the 3′ or 5′-terminal nucleoside of an oligonucleotide by a phosphate internucleoside linkage and covalently attached to the remainder of the conjugate linker or conjugate moiety by a phosphate or phosphorothioate linkage. In certain such embodiments, the cleavable moiety is 2′-deoxyadenosine.

[0282] 3. Certain Cell-Targeting Conjugate Moietiess

[0283] In certain embodiments, a conjugate group comprises a cell-targeting conjugate moiety. In certain embodiments, a conjugate group has the general formula:

[chemical structure]

[0284] wherein n is from 1 to about 3, m is 0 when n is 1, m is 1 when n is 2 or greater, j is 1 or 0, and k is 1 or 0.

[0285] In certain embodiments, n is 1, j is 1 and k is 0. In certain embodiments, n is 1, j is 0 and k is 1. In certain embodiments, n is 1, j is 1 and k is 1. In certain embodiments, n is 2, j is 1 and k is 0. In certain embodiments, n is 2, j is 0 and k is 1. In certain embodiments, n is 2, j is 1 and k is 1. In certain embodiments, n is 3, j is 1 and k is 0. In certain embodiments, n is 3, j is 0 and k is 1. In certain embodiments, n is 3, j is 1 and k is 1.

[0286] In certain embodiments, conjugate groups comprise cell-targeting moieties that have at least one tethered ligand. In certain embodiments, cell-targeting moieties comprise two tethered ligands covalently attached to a branching group. In certain embodiments, cell-targeting moieties comprise three tethered ligands covalently attached to a branching group.

[0287] In certain embodiments, conjugate groups comprise a cell-targeting moiety having the formula:

[chemical structure]

[0288] In certain embodiments, conjugate groups comprise a cell-targeting moiety having the formula:

[chemical structure]

[0289] wherein n is an integer selected from 1, 2, 3, 4, 5, 6, or 7. In certain embodiments, n is 1. In certain embodiments, n is 2. In certain embodiments, n is 3. In certain embodiments, n is 4. In certain embodiments, n is 5.

[0290] In certain embodiments, conjugate groups comprise a cell-targeting moiety having the formula:

[chemical structure]

[0291] In certain embodiments, conjugate groups comprise a cell-targeting moiety having the formula:

[chemical structure]

[0292] In certain embodiments, conjugate groups comprise a cell-targeting moiety having the formula:

[chemical structure]

[0293] In certain embodiments, conjugate groups comprise a cell-targeting moiety having the formula:

[chemical structure]

[0294] In certain embodiments, conjugate groups comprise a cell-targeting moiety having the formula:

[chemical structure]

[0295] In certain embodiments, oligomeric compounds comprise a conjugate group described herein as “LICA-1”. LICA-1 has the formula:

[chemical structure]

[0296] In certain embodiments, oligomeric compounds comprising LICA-1 have the formula:

[chemical structure]

[0297] wherein oligo is an oligonucleotide.

[0298] Representative United States patents, United States patent application publications, international patent application publications, and other publications that teach the preparation of certain of the above noted conjugate groups, oligomeric compounds comprising conjugate groups, tethers, conjugate linkers, branching groups, ligands, cleavable moieties as well as other modifications include without limitation, U.S. Pat. Nos. 5,994,517, 6,300,319, 6,660,720, 6,906,182, 7,262,177, 7,491,805, 8,106,022, 7,723,509, US 2006/0148740, US 2011/0123520, WO 2013/033230 and WO 2012/037254, Biessen et al., J Med. Chem. 1995, 38, 1846-1852, Lee et al., Bioorganic & Medicinal Chemistry 2011, 19, 2494-2500, Rensen et al., J Biol. Chem. 2001, 276, 37577-37584, Rensen et al., J. Med. Chem. 2004, 47, 5798-5808, Sliedregt et al., J. Med. Chem. 1999, 42, 609-618, and Valentijn et al., Tetrahedron, 1997, 53, 759-770.

[0299] In certain embodiments, oligomeric compounds comprise modified oligonucleotides comprising a fully modified sugar motif and a conjugate group comprising at least one, two, or three GalNAc ligands. In certain embodiments antisense compounds and oligomeric compounds comprise a conjugate group found in any of the following references: Lee, Carbohydr Res, 1978, 67, 509-514; Connolly et al., J Biol Chem, 1982, 257, 939-945; Pavia et al., Int J Pep Protein Res, 1983, 22, 539-548; Lee et al., Biochem, 1984, 23, 4255-4261; Lee et al., Glycoconjugate J, 1987, 4, 317-328; Toyokuni et al., Tetrahedron Lett, 1990, 31, 2673-2676; Biessen et al., J Med Chem, 1995, 38, 1538-1546; Valentijn et al., Tetrahedron, 1997, 53, 759-770; Kim et al., Tetrahedron Lett, 1997, 38, 3487-3490; Lee et al., Bioconjug Chem, 1997, 8, 762-765; Kato et al., Glycobiol, 2001, 11, 821-829; Rensen et al., J Biol Chem, 2001, 276, 37577-37584; Lee et al., Methods Enzymol, 2003, 362, 38-43; Westerlind et al., Glycoconj J, 2004, 21, 227-241; Lee et al., Bioorg Med Chem Lett, 2006, 16(19), 5132-5135; Maierhofer et al., Bioorg Med Chem, 2007, 15, 7661-7676; Khorev et al., Bioorg Med Chem, 2008, 16, 5216-5231; Lee et al., Bioorg Med Chem, 2011, 19, 2494-2500; Kornilova et al., Analyt Biochem, 2012, 425, 43-46; Pujol et al., Angew Chemie Int Ed Engl, 2012, 51, 7445-7448; Biessen et al., J Med Chem, 1995, 38, 1846-1852; Sliedregt et al., J Med Chem, 1999, 42, 609-618; Rensen et al., J Med Chem, 2004, 47, 5798-5808; Rensen et al., Arterioscler Thromb Vasc Biol, 2006, 26, 169-175; van Rossenberg et al., Gene Ther, 2004, 11, 457-464; Sato et al., J Am Chem Soc, 2004, 126, 14013-14022; Lee et al., J Org Chem, 2012, 77, 7564-7571; Biessen et al., FASEB J, 2000, 14, 1784-1792; Rajur et al., Bioconjug Chem, 1997, 8, 935-940; Duff et al., Methods Enzymol, 2000, 313, 297-321; Maier et al., Bioconjug Chem, 2003, 14, 18-29; Jayaprakash et al., Org Lett, 2010, 12, 5410-5413; Manoharan, Antisense Nucleic Acid Drug Dev, 2002, 12, 103-128; Merwin et al., Bioconjug Chem, 1994, 5, 612-620; Tomiya et al., Bioorg Med Chem, 2013, 21, 5275-5281; International applications WO1998/013381; WO2011/038356; WO1997/046098; WO2008/098788; WO2004/101619; WO2012/037254; WO2011/120053; WO2011/100131; WO2011/163121; WO2012/177947; WO2013/033230; WO2013/075035; WO2012/083185; WO2012/083046; WO2009/082607; WO2009/134487; WO2010/144740; WO2010/148013; WO1997/020563; WO2010/088537; WO2002/043771; WO2010/129709; WO2012/068187; WO2009/126933; WO2004/024757; WO2010/054406; WO2012/089352; WO2012/089602; WO2013/166121; WO2013/165816; U.S. Pat. Nos. 4,751,219; 8,552,163; 6,908,903; 7,262,177; 5,994,517; 6,300,319; 8,106,022; 7,491,805; 7,491,805; 7,582,744; 8,137,695; 6,383,812; 6,525,031; 6,660,720; 7,723,509; 8,541,548; 8,344,125; 8,313,772; 8,349,308; 8,450,467; 8,501,930; 8,158,601; 7,262,177; 6,906,182; 6,620,916; 8,435,491; 8,404,862; 7,851,615; Published U.S. Patent Application Publications US2011/0097264; US2011/0097265; US2013/0004427; US2005/0164235; US2006/0148740; US2008/0281044; US2010/0240730; US2003/0119724; US2006/0183886; US2008/0206869; US2011/0269814; US2009/0286973; US2011/0207799; US2012/0136042; US2012/0165393; US2008/0281041; US2009/0203135; US2012/0035115; US2012/0095075; US2012/0101148; US2012/0128760; US2012/0157509; US2012/0230938; US2013/0109817; US2013/0121954; US2013/0178512; US2013/0236968; US2011/0123520; US2003/0077829; US2008/0108801; and US2009/0203132.

[0300] In certain embodiments, compounds of the invention are single-stranded. In certain embodiments, oligomeric compounds are paired with a second oligonucleotide or oligomeric compound to form a duplex, which is double-stranded.

[0301] III. Certain Antisense Compounds

[0302] In certain embodiments, the present invention provides antisense compounds, which comprise or consist of an oligomeric compound comprising an antisense oligonucleotide, having a nucleobase sequences complementary to that of a target nucleic acid. In certain embodiments, antisense compounds are single-stranded. Such single-stranded antisense compounds typically comprise or consist of an oligomeric compound that comprises or consists of a modified oligonucleotide and optionally a conjugate group. In certain embodiments, antisense compounds are double-stranded. Such double-stranded antisense compounds comprise a first oligomeric compound having a region complementary to a target nucleic acid and a second oligomeric compound having a region complementary to the first oligomeric compound. The first oligomeric compound of such double stranded antisense compounds typically comprises or consists of a modified oligonucleotide and optionally a conjugate group. The oligonucleotide of the second oligomeric compound of such double-stranded antisense compound may be modified or unmodified. Either or both oligomeric compounds of a double-stranded antisense compound may comprise a conjugate group. The oligomeric compounds of double-stranded antisense compounds may include non-complementary overhanging nucleosides.

[0303] In certain embodiments, oligomeric compounds of antisense compounds are capable of hybridizing to a target nucleic acid, resulting in at least one antisense activity. In certain embodiments, antisense compounds selectively affect one or more target nucleic acid. Such selective antisense compounds comprises a nucleobase sequence that hybridizes to one or more target nucleic acid, resulting in one or more desired antisense activity and does not hybridize to one or more non-target nucleic acid or does not hybridize to one or more non-target nucleic acid in such a way that results in significant undesired antisense activity.

[0304] In certain embodiments, hybridization of an antisense compound to a target nucleic acid results in alteration of processing, e.g., splicing, of the target precursor transcript. In certain embodiments, hybridization of an antisense compound to a target precursor transcript results in inhibition of a binding interaction between the target nucleic acid and a protein or other nucleic acid. In certain such embodiments, hybridization of an antisense compound to a target precursor transcript results in alteration of translation of the target nucleic acid.

[0305] Antisense activities may be observed directly or indirectly. In certain embodiments, observation or detection of an antisense activity involves observation or detection of a change in an amount of a target nucleic acid or protein encoded by such target nucleic acid, a change in the ratio of splice variants of a nucleic acid or protein, and/or a phenotypic change in a cell or animal.

[0306] IV. Certain Target Nucleic Acids

[0307] In certain embodiments, antisense compounds and/or oligomeric compounds comprise or consist of an oligonucleotide comprising a region that is complementary to a target nucleic acid. In certain embodiments, the target nucleic acid is an endogenous RNA molecule. In certain embodiments, the target nucleic acid encodes a protein. In certain such embodiments, the target nucleic acid is selected from: a pre-mRNA, long non-coding RNA, pri-miRNA, intronic RNA, or other type of precursor transcript. In certain embodiments, the target nucleic acid is a pre-mRNA. In certain such embodiments, the target region is entirely within an intron. In certain such embodiments, the target region is entirely within an exon. In certain embodiments, the target region spans an intron/exon junction. In certain embodiments, the target region is at least 50% within an intron.

[0308] In certain embodiments, the target nucleic acid is a non-coding RNA. In certain such embodiments, the target non-coding RNA is selected from: a long-non-coding RNA, a short non-coding RNA, an intronic RNA molecule, a snoRNA, a scaRNA, a microRNA, a ribosomal RNA, and promoter directed RNA. In certain embodiments, the target nucleic acid is a nucleic acid other than a mature mRNA. In certain embodiments, the target nucleic acid is a nucleic acid other than a mature mRNA or a microRNA. In certain embodiments, the target nucleic acid is a non-coding RNA other than a microRNA. In certain embodiments, the target nucleic acid is a non-coding RNA other than a microRNA or an intronic region of a pre-mRNA. In certain embodiments, the target nucleic acid is a long non-coding RNA. In certain embodiments, the target nucleic acid is a non-coding RNA associated with splicing of other pre-mRNAs. In certain embodiments, the target nucleic acid is a nuclear-retained non-coding RNA.

[0309] In certain embodiments, antisense compounds described herein are complementary to a target nucleic acid comprising a single-nucleotide polymorphism (SNP). In certain such embodiments, the antisense compound is capable of modulating expression of one allele of the SNP-containing target nucleic acid to a greater or lesser extent than it modulates another allele. In certain embodiments, an antisense compound hybridizes to a (SNP)-containing target nucleic acid at the single-nucleotide polymorphism site.

[0310] In certain embodiments, antisense compounds are at least partially complementary to more than one target nucleic acid. For example, antisense compounds of the present invention may mimic microRNAs, which typically bind to multiple targets.

[0311] A. Complementarity/Mismatches to the Target Nucleic Acid

[0312] In certain embodiments, antisense compounds and/or oligomeric compounds comprise oligonucleotides that are complementary to the target nucleic acid over the entire length of the oligonucleotide. In certain embodiments, such oligonucleotides are 99% complementary to the target nucleic acid. In certain embodiments, such oligonucleotides are 95% complementary to the target nucleic acid. In certain embodiments, such oligonucleotides are 90% complementary to the target nucleic acid. In certain embodiments, such oligonucleotides are 85% complementary to the target nucleic acid. In certain embodiments, such oligonucleotides are 80% complementary to the target nucleic acid. In certain embodiments, antisense oligonucleotides are at least 80% complementary to the target nucleic acid over the entire length of the oligonucleotide and comprise a region that is 100% or fully complementary to a target nucleic acid. In certain such embodiments, the region of full complementarity is from 6 to 20 nucleobases in length. In certain such embodiments, the region of full complementarity is from 10 to 18 nucleobases in length. In certain such embodiments, the region of full complementarity is from 18 to 20 nucleobases in length.

[0313] In certain embodiments, oligomeric compounds and/or antisense compounds comprise one or more mismatched nucleobases relative to the target nucleic acid. In certain such embodiments, antisense activity against the target is reduced by such mismatch, but activity against a non-target is reduced by a greater amount. Thus, in certain such embodiments selectivity of the antisense compound is improved. In certain embodiments, the mismatch is specifically positioned within an oligonucleotide having a gapmer motif. In certain such embodiments, the mismatch is at position 1, 2, 3, 4, 5, 6, 7, or 8 from the 5′-end of the gap region. In certain such embodiments, the mismatch is at position 9, 8, 7, 6, 5, 4, 3, 2, 1 from the 3′-end of the gap region. In certain such embodiments, the mismatch is at position 1, 2, 3, or 4 from the 5′-end of the wing region. In certain such embodiments, the mismatch is at position 4, 3, 2, or 1 from the 3′-end of the wing region.

[0314] B. Modulation of Processing of Certain Target Nucleic Acids

[0315] In certain embodiments, oligomeric compounds comprise or consist of a modified oligonucleotide that is complementary to a target precursor transcript. In certain such embodiments, the target precursor transcript is a target pre-mRNA. In certain embodiments, contacting a cell with a compound complementary to a target precursor transcript modulates processing of the target precursor transcript. In certain such embodiments, the resulting target processed transcript has a different nucleobase sequence than the target processed transcript that is produced in the absence of the compound. In certain embodiments, the target precursor transcript is a target pre-mRNA and contacting a cell with a compound complementary to the target pre-mRNA modulates splicing of the target pre-mRNA. In certain such embodiments, the resulting target mRNA has a different nucleobase sequence than the target mRNA that is produced in the absence of the compound. In certain such embodiments, an exon is excluded from the target mRNA. In certain embodiments, an exon is included in the target mRNA. In certain embodiments, the exclusion or inclusion of an exon induces or prevents nonsense mediated decay of the target mRNA, removes or adds a premature termination codon from the target mRNA, and/or changes the reading frame of the target mRNA.

[0316] C. Certain Diseases and Conditions Associated with Certain Target Nucleic Acids

[0317] In certain embodiments, a target precursor transcript is associated with a disease or condition. In certain such embodiments, an oligomeric compound comprising or consisting of a modified oligonucleotide that is complementary to the target precursor transcript is used to treat the disease or condition. In certain such embodiments, the compound modulates processing of the target precursor transcript to produce a beneficial target processed transcript. In certain such embodiments, the disease or condition is associated with aberrant processing of a precursor transcript. In certain such embodiments, the disease or condition is associated with aberrant splicing of a pre-mRNA.

[0318] V. Certain Pharmaceutical Compositions

[0319] In certain embodiments, the present invention provides pharmaceutical compositions comprising one or more antisense compound or a salt thereof. In certain such embodiments, the pharmaceutical composition comprises a suitable pharmaceutically acceptable diluent or carrier. In certain embodiments, a pharmaceutical composition comprises a sterile saline solution and one or more antisense compound. In certain embodiments, such pharmaceutical composition consists of a sterile saline solution and one or more antisense compound. In certain embodiments, the sterile saline is pharmaceutical grade saline. In certain embodiments, a pharmaceutical composition comprises one or more antisense compound and sterile water. In certain embodiments, a pharmaceutical composition consists of one antisense compound and sterile water. In certain embodiments, the sterile water is pharmaceutical grade water. In certain embodiments, a pharmaceutical composition comprises one or more antisense compound and phosphate-buffered saline (PBS). In certain embodiments, a pharmaceutical composition consists of one or more antisense compound and sterile PBS. In certain embodiments, the sterile PBS is pharmaceutical grade PBS.

[0320] In certain embodiments, pharmaceutical compositions comprise one or more or antisense compound and one or more excipients. In certain such embodiments, excipients are selected from water, salt solutions, alcohol, polyethylene glycols, gelatin, lactose, amylase, magnesium stearate, talc, silicic acid, viscous paraffin, hydroxymethylcellulose and polyvinylpyrrolidone.

[0321] In certain embodiments, antisense compounds may be admixed with pharmaceutically acceptable active and/or inert substances for the preparation of pharmaceutical compositions or formulations. Compositions and methods for the formulation of pharmaceutical compositions depend on a number of criteria, including, but not limited to, route of administration, extent of disease, or dose to be administered.

[0322] In certain embodiments, pharmaceutical compositions comprising an oligomeric compound and/or antisense compound encompass any pharmaceutically acceptable salts of the antisense compound, esters of the antisense compound, or salts of such esters. In certain embodiments, pharmaceutical compositions comprising antisense compounds and/or oligomeric compounds comprising one or more oligonucleotide, upon administration to an animal, including a human, are capable of providing (directly or indirectly) the biologically active metabolite or residue thereof. Accordingly, for example, the disclosure is also drawn to pharmaceutically acceptable salts of antisense compounds, prodrugs, pharmaceutically acceptable salts of such prodrugs, and other bioequivalents. Suitable pharmaceutically acceptable salts include, but are not limited to, sodium and potassium salts. In certain embodiments, prodrugs comprise one or more conjugate group attached to an oligonucleotide, wherein the conjugate group is cleaved by endogenous nucleases within the body.

[0323] Lipid moieties have been used in nucleic acid therapies in a variety of methods. In certain such methods, the nucleic acid, such as an antisense compound, is introduced into preformed liposomes or lipoplexes made of mixtures of cationic lipids and neutral lipids. In certain methods, DNA complexes with mono- or poly-cationic lipids are formed without the presence of a neutral lipid. In certain embodiments, a lipid moiety is selected to increase distribution of a pharmaceutical agent to a particular cell or tissue. In certain embodiments, a lipid moiety is selected to increase distribution of a pharmaceutical agent to fat tissue. In certain embodiments, a lipid moiety is selected to increase distribution of a pharmaceutical agent to muscle tissue.

[0324] In certain embodiments, pharmaceutical compositions comprise a delivery system. Examples of delivery systems include, but are not limited to, liposomes and emulsions. Certain delivery systems are useful for preparing certain pharmaceutical compositions including those comprising hydrophobic compounds. In certain embodiments, certain organic solvents such as dimethylsulfoxide are used.

[0325] In certain embodiments, pharmaceutical compositions comprise one or more tissue-specific delivery molecules designed to deliver the one or more pharmaceutical agents of the present invention to specific tissues or cell types. For example, in certain embodiments, pharmaceutical compositions include liposomes coated with a tissue-specific antibody.

[0326] In certain embodiments, pharmaceutical compositions comprise a co-solvent system. Certain of such co-solvent systems comprise, for example, benzyl alcohol, a nonpolar surfactant, a water-miscible organic polymer, and an aqueous phase. In certain embodiments, such co-solvent systems are used for hydrophobic compounds. A non-limiting example of such a co-solvent system is the VPD co-solvent system, which is a solution of absolute ethanol comprising 3% w/v benzyl alcohol, 8% w/v of the nonpolar surfactant Polysorbate 80™ and 65% w/v polyethylene glycol 300. The proportions of such co-solvent systems may be varied considerably without significantly altering their solubility and toxicity characteristics. Furthermore, the identity of co-solvent components may be varied: for example, other surfactants may be used instead of Polysorbate 80™; the fraction size of polyethylene glycol may be varied; other biocompatible polymers may replace polyethylene glycol, e.g., polyvinyl pyrrolidone; and other sugars or polysaccharides may substitute for dextrose.

[0327] In certain embodiments, pharmaceutical compositions are prepared for oral administration. In certain embodiments, pharmaceutical compositions are prepared for buccal administration. In certain embodiments, a pharmaceutical composition is prepared for administration by injection (e.g., intravenous, subcutaneous, intramuscular, etc.). In certain of such embodiments, a pharmaceutical composition comprises a carrier and is formulated in aqueous solution, such as water or physiologically compatible buffers such as Hanks's solution, Ringer's solution, or physiological saline buffer. In certain embodiments, other ingredients are included (e.g., ingredients that aid in solubility or serve as preservatives). In certain embodiments, injectable suspensions are prepared using appropriate liquid carriers, suspending agents and the like. Certain pharmaceutical compositions for injection are presented in unit dosage form, e.g., in ampoules or in multi-dose containers. Certain pharmaceutical compositions for injection are suspensions, solutions or emulsions in oily or aqueous vehicles, and may contain formulatory agents such as suspending, stabilizing and/or dispersing agents. Certain solvents suitable for use in pharmaceutical compositions for injection include, but are not limited to, lipophilic solvents and fatty oils, such as sesame oil, synthetic fatty acid esters, such as ethyl oleate or triglycerides, and liposomes. Aqueous injection suspensions may contain.

### NONLIMITING DISCLOSURE AND INCORPORATION BY REFERENCE

[0328] All documents, or portions of documents, cited in this application, including, but not limited to, patents, patent applications, articles, books, treatises, and GenBank and NCBI reference sequence records are hereby expressly incorporated by reference in their entirety.

[0329] While certain compounds, compositions and methods described herein have been described with specificity in accordance with certain embodiments, the following examples serve only to illustrate the compounds described herein and are not intended to limit the same.

[0330] Certain compounds exemplified herein comprise structural features of the claimed invention but are complementary to sequences other than dystrophin. Certain properties of such compounds are attributed to those structural features and are thus expected to be found in similar compounds that are complementary to dystrophin.

[0331] Although the sequence listing accompanying this filing identifies each sequence as either “RNA” or “DNA” as required, in reality, those sequences may be modified with any combination of chemical modifications. One of skill in the art will readily appreciate that such designation as “RNA” or “DNA” to describe modified oligonucleotides is, in certain instances, arbitrary. For example, an oligonucleotide comprising a nucleoside comprising a 2′-OH sugar moiety and a thymine base could be described as a DNA having a modified sugar (2′-OH in place of one 2′-H of DNA) or as an RNA having a modified base (thymine (methylated uracil) in place of a uracil of RNA). Accordingly, nucleic acid sequences provided herein, including, but not limited to those in the sequence listing, are intended to encompass nucleic acids containing any combination of natural or modified RNA and/or DNA, including, but not limited to such nucleic acids having modified nucleobases. By way of further example and without limitation, an oligomeric compound having the nucleobase sequence “ATCGATCG” encompasses any oligomeric compounds having such nucleobase sequence, whether modified or unmodified, including, but not limited to, such compounds comprising RNA bases, such as those having sequence “AUCGAUCG” and those having some DNA bases and some RNA bases such as “AUCGATCG” and oligomeric compounds having other modified nucleobases, such as “ATmCGAUCG,” wherein ^{m}C indicates a cytosine base comprising a methyl group at the 5-position.

[0332] Certain compounds described herein (e.g., modified oligonucleotides) have one or more asymmetric center and thus give rise to enantiomers, diastereomers, and other stereoisomeric configurations that may be defined, in terms of absolute stereochemistry, as (R) or (S), as α or β, such as for sugar anomers, or as (D) or (L), such as for amino acids, etc. Included in the compounds provided herein are all such possible isomers, including their racemic and optically pure forms, unless specified otherwise. Likewise, all cis- and trans-isomers and tautomeric forms are also included unless otherwise indicated. Oligomeric compounds described herein include chirally pure or enriched mixtures as well as racemic mixtures. For example, oligomeric compounds having a plurality of phosphorothioate internucleoside linkages include such compounds in which chirality of the phosphorothioate internucleoside linkages is controlled or is random.

[0333] Unless otherwise indicated, any compound, including oligomeric compounds, described herein includes a pharmaceutically acceptable salt thereof.

[0334] The compounds described herein include variations in which one or more atoms are replaced with a non-radioactive isotope or radioactive isotope of the indicated element. For example, compounds herein that comprise hydrogen atoms encompass all possible deuterium substitutions for each of the ¹H hydrogen atoms. Isotopic substitutions encompassed by the compounds herein include but are not limited to: ²H or ³H in place of ¹H, ¹³C or ¹⁴C in place of ¹²C, ¹⁵N in place of ¹⁴N, ¹⁷O or ¹⁸O in place of ¹⁶O, and ³³S, ³⁴S, ³⁵S, or ³⁶S in place of ³²S. In certain embodiments, non-radioactive isotopic substitutions may impart new properties on the oligomeric compound that are beneficial for use as a therapeutic or research tool. In certain embodiments, radioactive isotopic substitutions may make the compound suitable for research or diagnostic purposes such as imaging.

### EXAMPLES

### Example 1: Effect of Modified Oligonucleotides Targeting SMN2 In Vitro

[0335] Modified oligonucleotides comprising 2′-MOE or 2′-NMA modifications, shown in the table below, were tested in vitro for their effects on splicing of exon 7 in SMN2.

[0336] A spinal muscular atrophy (SMA) patient fibroblast cell line (GM03813: Cornell Institute) was plated at a density of 25,000 cells per well and transfected using electroporation at 120V with a concentration of modified oligonucleotide listed in the table below. After a treatment period of approximately 24 hours, cells were washed with DPBS buffer and lysed. RNA was extracted using Qiagen RNeasy purification and mRNA levels were measured by qRT-PCR. The level of SMN2 with exon 7 was measured using primer/probe set hSMN2vd#4_LTS00216_MGB; the level of SMN2 without exon 7 was measured using hSMN2va#4_LTS00215_MGB; and the level of total SMN2 was measured using HTS4210. The amounts of SMN2 with and without exon 7 were normalized to total SMN2. The results are presented in the table below as the levels of SMN2 with exon 7 (+ exon 7) relative to total SMN2 and the levels of SMN2 without exon 7 (− exon 7) relative to total SMN2. As illustrated in the table below, treatment with the modified oligonucleotide comprising 2′-NMA modifications exhibited greater exon 7 inclusion (and reduced exon 7 exclusion) compared to the modified oligonucleotide comprising 2′-MOE modifications in SMA patient fibroblast cells.

TABLE 1
Modified oligonucleotides targeting human SMN2

| Compound | | SEQ ID |
|---|---|---|
| No. | Sequence (5′ to 3′) | NO. |
| 396443 | Tₑₛ ^{m}Cₑₛ Aₑₛ ^{m}Cₑₛ Tₑₛ Tₑₛ Tₑₛ ^{m}Cₑₛ Aₑₛ Tₑₛ Aₑₛ Aₑₛ Tₑₛ Gₑₛ ^{m}Cₑₛ Tₑₛ Gₑₛ Gₑ | 208 |
| 443305 | Tₙₛ ^{m}Cₙₛ Aₙₛ ^{m}Cₙₛ Tₙₛ Tₙₛ Tₙₛ ^{m}Cₙₛ Aₙₛ Tₙₛ Aₙₛ Aₙₛ Tₙₛ Gₙₛ ^{m}Cₙₛ Tₙₛ GₙₛGₙ | 208 |

Subscripts in the table above: “s” represents a phosphorothioate internucleoside linkage, “e” represents a 2′-MOE modified nucleoside, “n” represents a 2′-O-(N-methylacetamide) modified nucleoside.
Superscripts: “m” before a C represents a 5-methylcytosine.

TABLE 2
Exon 7 inclusion and exclusion

| Compound | Concentration | +exon7/total | −exon7/total |
|---|---|---|---|
| No. | (nM) | SMN | SMN |
| 396443 | 51 | 1.12 | 0.73 |
| | 128 | 1.16 | 0.59 |
| | 320 | 1.40 | 0.49 |
| | 800 | 1.34 | 0.41 |
| | 2000 | 1.48 | 0.37 |
| | 5000 | 1.57 | 0.37 |
| 443305 | 51 | 1.44 | 0.61 |
| | 128 | 1.42 | 0.45 |
| | 320 | 1.60 | 0.42 |
| | 800 | 1.60 | 0.38 |
| | 2000 | 1.63 | 0.36 |
| | 5000 | 1.63 | 0.42 |

### Example 2: Effect of Modified Oligonucleotides Targeting SMN2 in Transgenic Mice

[0337] Taiwan strain of SMA Type III human transgenic mice (Jackson Laboratory, Bar Harbor, Me.) lack mouse SMN and are homozygous for human SMN2. These mice have been described in Hsieh-Li et al., Nature Genet. 24, 66-70 (2000). Each mouse received an intracerebroventricular (ICV) bolus of saline (PBS) or Compound 396443 or Compound 443305 (see Example 1) once on Day 1. Each treatment group consisted of 3-4 mice. The mice were sacrificed 7 days later, on Day 7. Total RNA from the spinal cord and brain was extracted and analyzed by RT-qPCR, as described in Example 1. The ratios of SMN2 with exon 7 to total SMN2 and SMN2 without exon 7 to total SMN2 were set to 1.0 for the PBS treated control group. The normalized results for all treatment groups are presented in the table below. As illustrated in the table below, the modified oligonucleotide comprising 2′-NMA modifications exhibited greater exon 7 inclusion and less exon 7 exclusion than the modified oligonucleotide comprising 2′-MOE modifications in vivo.

TABLE 3
Exon 7 inclusion and exclusion

| | | Spinal Cord | | | Brain | |
|---|---|---|---|---|---|---|
| | | +exon | −exon | | +exon | −exon |
| Compound | Dose | 7/total | 7/total | ED₅₀ | 7/total | 7/total |
| No. | (ug) | SMN | SMN | (ug) | SMN | SMN |
| PBS | 0 | 1.0 | 1.0 | n/a | 1.0 | 1.0 |
| 396443 | 10 | 2.1 | 0.8 | 15 | 1.6 | 0.9 |
| | 30 | 2.9 | 0.5 | | 2.5 | 0.7 |
| | 100 | 3.5 | 0.4 | | 3.3 | 0.5 |
| 443305 | 10 | 2.7 | 0.5 | 8 | 2.4 | 0.6 |
| | 30 | 3.6 | 0.3 | | 3.3 | 0.5 |
| | 100 | 3.8 | 0.3 | | 3.9 | 0.3 |

### Example 3: Effect of Modified Oligonucleotides Targeting SMN2 in Transgenic Mice Following Systemic Administration

[0338] Taiwan Type III human transgenic mice received an intraperitoneal (IP) injection of saline (PBS), Compound No. 396443, or Compound No. 443305 (see Example 1) once every 48 hours for a total of four injections. Each treatment group consisted of 3-4 mice. The mice were sacrificed 72 hours following the last dose. Various tissues including liver, diaphragm, quadriceps and heart were collected, and total RNA was isolated. SMN2 with and without exon 7 and total SMN2 levels were measured by RT-qPCR as described in Examples 1 and 2, except that the primer/probe sets for this experiment were those described in Tiziano, et al., Eur J Humn Genet, 2010. The results are presented in the tables below. The results show that systemic administration of the modified oligonucleotide comprising 2′-NMA modifications resulted in greater exon 7 inclusion and less exon 7 exclusion than the modified oligonucleotide comprising 2′-MOE modifications.

TABLE 4
Exon 7 inclusion and exclusion

| | | Liver | | Diaphragm | | Quadriceps | | Heart | |
|---|---|---|---|---|---|---|---|---|---|
| | | +exon | −exon | +exon | −exon | +exon | −exon | +exon | −exon |
| Comp. | Dose | 7/total | 7/total | 7/total | 7/total | 7/total | 7/total | 7/total | 7/total |
| No. | (mg/kg) | SMN | SMN | SMN | SMN | SMN | SMN | SMN | SMN |
| 396443 | 8.3 | 1.7 | 0.7 | 1.5 | 0.7 | 1.0 | 0.8 | 1.3 | 0.9 |
| | 25 | 2.6 | 0.4 | 2.3 | 0.6 | 1.2 | 0.8 | 1.4 | 0.9 |
| | 75 | 3.2 | 0.3 | 2.5 | 0.4 | 1.4 | 0.7 | 1.8 | 0.8 |
| 443305 | 8.3 | 2.1 | 0.4 | 2.2 | 0.5 | 1.3 | 0.8 | 1.3 | 0.8 |
| | 25 | 2.7 | 0.3 | 2.8 | 0.3 | 1.6 | 0.7 | 1.7 | 0.8 |
| | 75 | 3.3 | 0.2 | 3.3 | 0.3 | 2.3 | 0.4 | 2.1 | 0.5 |

TABLE 5
ED₅₀ values (mg/kg) calculated from Table 4 results

| Compound | | | | |
|---|---|---|---|---|
| No. | Liver | Diaphragm | Quadriceps | Heart |
| 396443 | 13 | 27 | >75 | 32 |
| 443305 | 9 | 8 | 21 | 15 |

### Example 4: Effect of Modified Oligonucleotides Targeting SMN2 in Transgenic Mice

[0339] Taiwan Type III human transgenic mice received an ICV bolus of saline (PBS) or a modified oligonucleotide listed in the table below. Each treatment group consisted of 3-4 mice. The mice were sacrificed two weeks following the dose. The brain and spinal cord of each mouse was collected, and total RNA was isolated from each tissue. SMN2 with and without exon 7 and total SMN2 levels were measured by RT-qPCR as described in Examples 1 and 2, and the results are presented in the tables below. The results show that the modified oligonucleotides comprising 2′-NMA modifications resulted greater exon 7 inclusion and less exon 7 exclusion than the modified oligonucleotide comprising 2′-MOE modifications.

TABLE 6
Modified oligonucleotides targeting human SMN2

| | | SEQ |
|---|---|---|
| Comp. | | ID |
| No. | Sequence | NO. |
| 387954 | Aₑₛ Tₑₛ Tₑₛ ^{m}Cₑₛ Aₑₛ ^{m}Cₑₛ Tₑₛ Tₑₛ Tₑₛ ^{m}Cₑₛ Aₑₛ Tₑₛ Aₑₛ Aₑₛ Tₑₛ Gₑₛ ^{m}Cₑₛ Tₑₛ Gₑₛ Gₑ | 209 |
| 443305 | Tₙₛ ^{m}Cₙₛ Aₙₛ ^{m}Cₙₛ Tₙₛ Tₙₛ Tₙₛ ^{m}Cₙₛ Aₙₛ Tₙₛ Aₙₛ Aₙₛ Tₙₛ Gₙₛ ^{m}Cₙₛ Tₙₛ Gₙₛ Gₙ | 208 |
| 819735 | ^{m}Cₙₛ Aₙₛ ^{m}Cₙₛ Tₙₛ Tₙₛ Tₙₛ ^{m}Cₙₛ Aₙₛ Tₙₛ Aₙₛ Aₙₛ Tₙₛ Gₙₛ ^{m}Cₙₛ Tₙₛ Gₙₛ Gₙ ^{m}Cₙ | 210 |
| 819736 | Tₙₛ ^{m}Cₙₛ Aₙₛ ^{m}Cₙₒ Tₙₛ Tₙₒ Tₙₛ ^{m}Cₙₒ Aₙₛ Tₙₒ Aₙₛ Aₙₒ Tₙₛ Gₙₒ ^{m}Cₙₛ Tₙₛ Gₙₛ Gₙ | 208 |

Subscripts in the table above: “s” represents a phosphorothioate internucleoside linkage, “e” represents a 2′-MOE modified nucleoside, “n” represents a 2′-O-(N-methylacetamide) modified nucleoside.
Superscripts: “m” before a C represents a 5-methylcytosine.

TABLE 7
Exon 7 inclusion and exclusion

| | | Spinal Cord | | Brain | | |
|---|---|---|---|---|---|---|
| | | +exon | −exon | +exon | −exon | |
| Comp. | Dose | 7/total | 7/total | 7/total | 7/total | ED₅₀ |
| No. | (ug) | SMN | SMN | SMN | SMN | (μg) |
| PBS | 0 | 1.0 | 1.0 | 1.0 | 1.0 | n/a |
| 387954 | 10 | 3.2 | 0.6 | 1.5 | 0.8 | 40 |
| | 30 | 3.9 | 0.4 | 2.6 | 0.6 | |
| | 100 | 3.8 | 0.3 | 5.4 | 0.2 | |
| 443305 | 10 | 3.8 | 0.3 | 3.0 | 0.6 | 15 |
| | 30 | 4.1 | 0.2 | 4.3 | 0.4 | |
| | 100 | 4.2 | 0.1 | 5.4 | 0.2 | |
| 819735 | 10 | 3.5 | 0.4 | 3.3 | 0.6 | 13 |
| | 30 | 4.4 | 0.2 | 4.3 | 0.4 | |
| | 100 | 4.2 | 0.2 | 5.6 | 0.1 | |
| 819736 | 10 | 2.3 | 0.6 | 2.4 | 0.8 | 26 |
| | 30 | 3.3 | 0.4 | 3.7 | 0.6 | |
| | 100 | 4.3 | 0.2 | 4.9 | 0.3 | |

### Example 5: Effect of Modified Oligonucleotides Targeting SMN2 in Transgenic Mice Following Systemic Administration

[0340] Taiwan Type III human transgenic mice received a subcutaneous injection of saline (PBS) or a modified oligonucleotide listed in Example 4 once every 48-72 hours for a total of 10-150 mg/kg/week for three weeks. Each treatment group consisted of 4 mice. The mice were sacrificed 72 hours following the last dose. Various tissues were collected, and total RNA was isolated from each tissue. SMN2 with and without exon 7 and total SMN2 levels were measured by RT-qPCR as described in Examples 1 and 2, and the results are presented in the tables below. The results show that systemic administration of the modified oligonucleotides comprising 2′-NMA modifications resulted greater exon 7 inclusion and less exon 7 exclusion than the modified oligonucleotide comprising 2′-MOE modifications.

TABLE 8
Exon 7 inclusion and exclusion

| | | Tissue | | | | | | | | | |
|---|---|---|---|---|---|---|---|---|---|---|---|
| | Dose | Quadriceps | | TA Muscle | | Diaphragm | | Liver | | Lung | |
| | (mg/ | +exon | −exon | +exon | −exon | +exon | −exon | +exon | −exon | +exon | −exon |
| Comp. | kg/ | 7/total | 7/total | 7/total | 7/total | 7/total | 7/total | 7/total | 7/total | 7/total | 7/total |
| No. | wk) | SMN | SMN | SMN | SMN | SMN | SMN | SMN | SMN | SMN | SMN |
| PBS | — | 1.0 | 1.0 | 1.0 | 1.0 | 1.0 | 1.0 | 1.0 | 1.0 | 1.0 | 1.0 |
| 387954 | 10 | 1.0 | 0.9 | 1.2 | 1.0 | 1.1 | 0.9 | 1.3 | 0.9 | 1.4 | 0.8 |
| | 30 | 1.2 | 0.8 | 1.5 | 0.9 | 1.4 | 0.8 | 1.8 | 0.6 | 1.4 | 0.6 |
| | 100 | 1.5 | 0.5 | 1.8 | 0.6 | 2.1 | 0.5 | 2.4 | 0.3 | 1.6 | 0.4 |
| | 150 | 1.6 | 0.4 | 2.3 | 0.5 | 2.3 | 0.4 | 2.7 | 0.2 | 1.8 | 0.4 |
| 443305 | 10 | 1.1 | 0.7 | 1.4 | 0.9 | 1.6 | 0.8 | 1.9 | 0.5 | 1.2 | 0.6 |
| | 30 | 1.4 | 0.5 | 1.7 | 0.7 | 2.1 | 0.5 | 2.6 | 0.3 | 1.6 | 0.5 |
| | 100 | 2 | 0.2 | 2.4 | 0.3 | 2.7 | 0.2 | 2.7 | 0.1 | 1.7 | 0.3 |
| | 150 | 2.1 | 0.2 | 2.8 | 0.2 | 2.9 | 0.2 | 2.9 | 0.1 | 1.7 | 0.3 |
| 819735 | 30 | 1.4 | 0.4 | 2 | 0.7 | 2.1 | 0.5 | 3.2 | 0.2 | 1.5 | 0.5 |
| | 100 | 2 | 0.2 | 2.8 | 0.3 | 3 | 0.2 | 3 | 0.1 | 1.8 | 0.4 |
| 819736 | 8.3 | 1.5 | 0.4 | 2 | 0.6 | 2 | 0.5 | 2.5 | 0.4 | 1.3 | 0.6 |

TABLE 9
ED₅₀ values (mg/kg) calculated from Table 9 results

| Comp. | Tissue | | | | |
|---|---|---|---|---|---|
| No. | Quadriceps | TA muscle | Diaphragm | Liver | Lung |
| 387954 | >150 | 142 | 105 | 57 | 31 |
| 443305 | 68 | 56 | 30 | 16 | 24 |
| 819735 | 58 | 37 | 31 | <30 | 25 |

“n.d.” indicates no data, the ED₅₀ was not calculated.

### Example 6: Effect of Compounds Comprising a Conjugate Group and a Modified Oligonucleotide Targeting SMN2 in Transgenic Mice Following Systemic Administration

[0341] Taiwan type III human transgenic mice were treated by subcutaneous administration with 10-300 mg/kg/week of a modified oligonucleotide listed in the table below or saline (PBS) alone for three weeks and sacrificed 48-72 hours after the last dose. There were 3-4 mice per group. Total RNA from various tissues was extracted and RT-qPCR was performed as described in Examples 1 and 2. The results presented in the table below show that the oligomeric compound comprising a C16 conjugate and 2′-NMA modifications exhibited greater exon 7 inclusion and less exon 7 exclusion than the other compounds tested.

TABLE 10
Modified oligonucleotides targeting human SMN2

| Comp. | | SEQ ID |
|---|---|---|
| No. | Sequence (5′ to 3′) | NO. |
| 387954 | Aₑₛ Tₑₛ Tₑₛ ^{m}Cₑₛ Aₑₛ ^{m}Cₑₛ Tₑₛ Tₑₛ Tₑₛ ^{m}Cₑₛ Aₑₛ Tₑₛ Aₑₛ Aₑₛ Tₑₛ Gₑₛ ^{m}Cₑₛ Tₑₛ Gₑₛ Gₑ | 209 |
| 881068 | C16-HA-Aₑₛ Tₑₛ Tₑₛ ^{m}Cₑₛ Aₑₛ ^{m}Cₑₛ Tₑₛ Tₑₛ Tₑₛ ^{m}Cₑₛ Aₑₛ Tₑₛ Aₑₛ Aₑₛ Tₑₛ Gₑₛ ^{m}Cₑₛ Tₑₛ Gₑₛ Gₑ | 209 |
| 881069 | C16-HA-Tₑₛ ^{m}Cₑₛ Aₑₛ ^{m}Cₑₛ Tₑₛ Tₑₛ Tₑₛ ^{m}Cₑₛ Aₑₛ Tₑₛ Aₑₛ Aₑₛ Tₑₛ Gₑₛ ^{m}Cₑₛ Tₑₛ Gₑₛ Gₑ | 208 |
| 881070 | C16-HA-Tₑₛ ^{m}Cₑₛ Aₑₛ ^{m}Cₑₒ Tₑₛ Tₑₒ Tₑₛ ^{m}Cₑₒ Aₑₛ Tₑₒ Aₑₛ Aₑₒ Tₑₛ Gₑₒ ^{m}Cₑₛ Tₑₛ Gₑₛ Gₑ | 208 |
| 881071 | C16-HA-Tₙₛ ^{m}Cₙₛ Aₙₛ ^{m}Cₙₛ Tₙₛ Tₙₛ Tₙₛ ^{m}Cₙₛ Aₙₛ Tₙₛ Aₙₛ Aₙₛ Tₙₛ Gₙₛ ^{m}Cₙₛ Tₙₛ Gₙₛ Gₙ | 208 |

Subscripts in the table above: “s” represents a phosphorothioate internucleoside linkage, “o” represents a phosphate internucleoside linkage, “d” represents a 2′-deoxynucleoside, “e” represents a 2′-MOE modified nucleoside, “n” represents a 2′-O-(N-methylacetamide) modified nucleoside.
Superscripts: “m” before a C represents a 5-methylcysteine.

The structure of C16-HA is:

[chemical structure]

TABLE 11
Exon 7 inclusion and exclusion

| | Dose | TA Muscle | | | Gastrocnemius | | | Diaphragm | | |
|---|---|---|---|---|---|---|---|---|---|---|
| | (mg/ | +exon | −exon | ED₅₀ | +exon | −exon | ED₅₀ | +exon | −exon | ED₅₀ |
| Comp. | kg/ | 7/total | 7/total | (mg/ | 7/total | 7/total | (mg/ | 7/total | 7/total | (mg/ |
| No. | wk) | SMN | SMN | kg) | SMN | SMN | kg) | SMN | SMN | kg) |
| PBS | — | 1.0 | 1 | n/a | 1.0 | 1.0 | n/a | 1.0 | 1.0 | n/a |
| 387954 | 30 | 1.0 | 0.9 | 242 | 1.0 | 1.0 | 204 | 1.5 | 0.8 | 122 |
| | 100 | 1.4 | 0.6 | | 1.7 | 0.7 | | 1.9 | 0.6 | |
| | 300 | 2.1 | 0.4 | | 2.3 | 0.3 | | 2.6 | 0.4 | |
| 881068 | 10 | 1.0 | 1.0 | 74 | 0.9 | 1.0 | 69 | 1.1 | 0.9 | 46 |
| | 30 | 1.3 | 0.8 | | 1.3 | 0.8 | | 1.7 | 0.7 | |
| | 100 | 2.2 | 0.2 | | 2.5 | 0.2 | | 2.8 | 0.2 | |
| 881069 | 10 | 1.0 | 1.0 | 56 | 1.0 | 1.0 | 53 | 1.3 | 0.8 | 33 |
| | 30 | 1.4 | 0.7 | | 1.6 | 0.8 | | 2.0 | 0.6 | |
| | 100 | 2.5 | 0.2 | | 2.6 | 0.2 | | 2.9 | 0.1 | |
| 881070 | 10 | 1.1 | 0.9 | 59 | 0.9 | 0.9 | 60 | 1.3 | 1.0 | 26 |
| | 30 | 1.5 | 0.7 | | 1.5 | 0.6 | | 2.3 | 0.6 | |
| | 100 | 2.3 | 0.2 | | 2.6 | 0.2 | | 3.0 | 0.2 | |
| 881071 | 10 | 1.4 | 0.7 | 23 | 1.5 | 0.7 | 19 | 2.0 | 0.6 | 12 |
| | 30 | 2.2 | 0.2 | | 2.5 | 0.2 | | 2.7 | 0.2 | |
| | 100 | 2.6 | 0.1 | | 2.8 | 0.1 | | 3.0 | 0.2 | |

### Example 7: Effect of 2′-NMA Modified Oligonucleotide Targeting DMD In Vivo

[0342] A modified oligonucleotide comprising 2′-NMA modifications, shown in the table below, was tested in C57BL/10ScSn-DMD^{mdx}/J mice (Jackson Laboratory, Bar Harbor, Me.), referred to herein as “DMD^{mdx}” mice to assess its effects on splicing of exon 23 of dystrophin (DMD). The DMD^{mdx} mice do not have a wild type dystrophin gene. They are homozygous for dystrophin containing a mutation that generates a premature termination codon in exon 23. Each mouse received two intramuscular (IM) injections of saline (PBS) or of 20 μg Isis 582040 in 0.2 mg/mL Pluronic F127. Each treatment group consisted of 4 male mice. The mice were sacrificed 9 days after the first dose. Total RNA was extracted from the quadricep and analyzed by RT-PCR using PCR primers: 5′-CAGCCATCCATTTCTGTAAGG-3′ (SEQ ID No.: 1) and 5′-ATCCAGCAGTCAGAAAGCAAA-3′ (SEQ ID No.: 2). The two dystrophin PCR products (including exon 23 and excluding exon 23) were separated on a gel, and the two bands were quantified to calculate the percentage of exon 23 skipping that had occurred relative to total dystrophin mRNA levels. As illustrated in the table below, the modified oligonucleotide comprising 2′-NMA modifications exhibited significant exon skipping in vivo.

TABLE 12
Exon skipping by a modified oligonucleotide targeting mouse DMD

| | | Exon 23 | |
|---|---|---|---|
| | | skipping | SEQ ID |
| Isis No. | Sequence (5′ to 3′) | (%) | NO. |
| PBS | n/a | 1.7 | — |
| 582040 | Gₙₛ Gₙₛ ^{m}Cₙₛ ^{m}Cₙₛ Aₙₛ Aₙₛ Aₙₛ ^{m}Cₙₛ ^{m}Cₙₛ Tₙₛ ^{m}Cₙₛ Gₙₛ Gₙₛ ^{m}Cₙₛ Tₙₛ Tₙₛ | 32.1 | 211 |
| | Aₙₛ ^{m}Cₙₛ ^{m}Cₙₛ Tₙ | | |

Subscripts in the table above: “s” represents a phosphorothioate internucleoside linkage, “n” represents a 2′-O-(N-methyl acetamide) modified nucleoside.
Superscripts: “m” before a C represents a 5-methylcytosine.

### Example 8: Compounds Comprising Modified Oligonucleotides Targeting Human DMD

[0343] Oligomeric compounds comprising modified oligonucleotides complementary to exon 51 or 53 of human dystrophin pre-mRNA were synthesized and are shown in the table below. Transgenic mice expressing a human dystrophin gene with a deletion that results in a premature termination codon are administered the compounds listed below. Exclusion of exon 51 or exon 53 from the mutant dystrophin in the transgenic mice results in restoration of the correct reading frame with no premature termination codon. The compounds are tested for their ability to restore the correct reading frame and/or exon 51 or exon 53 skipping. Groups of 4 week old mice are administered subcutaneous injections of the compounds listed below for 8 weeks. One week after the last dose, the mice are sacrificed and total RNA is isolated from various tissues and analyzed by RT-PCR.

TABLE 13
Compounds comprising modified oligonucleotides targeting human DMD

| Isis or | | SEQ ID |
|---|---|---|
| Ion No. | Sequence (5′ to 3′) | NO. |
| 510198 | Tₑₛ ^{m}Cₑₛ Aₑₛ Aₑₛ Gₑₛ Gₑₛ Aₑₛ Aₑₛ Gₑₛ Aₑₛ Tₑₛ Gₑₛ Gₑₛ ^{m}Cₑₛ Aₑₛ Tₑₛ Tₑₛ Tₑₛ ^{m}Cₑₛ Tₑ | 175 |
| 554021 | ^{m}Cₑₛ Tₑₛ Gₑₛ Tₑₛ Tₑₛ Gₑₛ ^{m}Cₑₛ ^{m}Cₑₛ Tₑₛ ^{m}Cₑₛ ^{m}Cₑₛ Gₑₛ Gₑₛ Tₑₛ Tₑₛ ^{m}Cₑₛ Tₑₛ Gₑ | 188 |
| 919550 | C16-HA-Tₑₛ ^{m}Cₑₛ Aₑₛ Aₑₛ Gₑₛ Gₑₛ Aₑₛ Aₑₛ Gₑₛ Aₑₛ Tₑₛ Gₑₛ Gₑₛ ^{m}Cₑₛ Aₑₛ Tₑₛ Tₑₛ Tₑₛ ^{m}Cₑₛ Tₑ | 175 |
| 919551 | C16-HA- ^{m}Cₑₛ Tₑₛ Gₑₛ Tₑₛ Gₑₛ ^{m}Cₑₛ ^{m}Cₑₛ Tₑₛ ^{m}Cₑₛ ^{m}Cₑₛ Gₑₛ Gₑₛ Tₑₛ Tₑₛ ^{m}Cₑₛ Tₑₛ Gₑ | 188 |
| 929849 | C16-HA-Tₙₛ ^{m}Cₙₛ Aₙₛ Aₙₛ Gₙₛ Gₙₛ Aₙₛ Aₙₛ Gₙₛ Aₙₛ Tₙₛ Gₙₛ Gₙₛ ^{m}Cₙₛ Aₙₛ Tₙₛ Tₙₛ Tₙₛ ^{m}Cₙₛ Tₙ | 175 |
| 929850 | C16-HA-^{m}Cₙₛ Tₙₛ Gₙₛ Tₙₛ Tₙₛ Gₙₛ ^{m}Cₙₛ ^{m}Cₙₛ Tₙₛ ^{m}Cₙₛ ^{m}Cₙₛ Gₙₛ Gₙₛ Tₙₛ Tₙₛ ^{m}Cₙₛ Tₙₛ Gₙ | 188 |
| 929851 | Tₙₛ ^{m}Cₙₛ Aₙₛ Aₙₛ Gₙₛ Gₙₛ Aₙₛ Aₙₛ Gₙₛ Aₙₛ Tₙₛ Gₙₛ Gₙₛ ^{m}Cₙₛ Aₙₛ Tₙₛ Tₙₛ Tₙₛ ^{m}Cₙₛ Tₙ | 175 |
| 929852 | ^{m}Cₙₛ Tₙₛ Gₙₛ Tₙₛ Tₙₛ Gₙₛ ^{m}Cₙₛ ^{m}Cₙₛ Tₙₛ ^{m}Cₙₛ ^{m}Cₙₛ Gₙₛ Gₙₛ Tₙₛ Tₙₛ ^{m}Cₙₛ Tₙₛ Gₙ | 188 |

Subscripts in the table above: “s” represents a phosphorothioate internucleoside linkage, “o” represents a phosphate internucleoside linkage, “e” represents a 2′-MOE modified nucleoside, and “n” represents a 2′-O-(N-methyl acetamide) modified nucleoside.
Superscripts: “m” before a C represents a 5-methylcytosine.

The structure of C16-HA is:

[chemical structure]

### Example 9: Dose Response Effects of Oligomeric Compounds Comprising a Lipophilic Conjugate Group In Vivo

[0344] The oligomeric compounds described in the table below are complementary to both human and mouse MALAT-1 transcripts. Their effects on MALAT-1 expression were tested in vivo. Male diet-induced obesity (DIO) mice each received an intravenous injection, via the tail vein, of an oligomeric compound listed in the table below or saline vehicle alone once per week for two weeks. Each treatment group consisted of three or four mice. Three days after the final injection, the animals were sacrificed. MALAT-1 RNA expression in the heart analyzed by RT-qPCR and normalized to total RNA using RiboGreen (Thermo Fisher Scientific, Carlsbad, Calif.) is shown below. The average results for each group are shown as the percent normalized MALAT-1 RNA levels relative to average results for the vehicle treated animals. The data below show that the oligomeric compounds comprising a lipophilic conjugate group were more potent in the heart compared to the parent compound that does not comprise a lipophilic conjugate group.

TABLE 14
MALAT-1 expression in vivo

| | | Dosage | MALAT-1 RNA level | SEQ ID |
|---|---|---|---|---|
| Isis No. | Sequence (5′ to 3′) | (μmol/kg/week) | in heart (% Vehicle) | NO. |
| 556089 | Gₖₛ ^{m}Cₖₛ Aₖₛ T_{ds} T_{ds} ^{m}C_{ds} T_{ds} A_{ds} A_{ds} | 0.2 | 105 | 212 |
| | T_{ds} A_{ds} G_{ds} ^{m}C_{ds} Aₖₛ Gₖₛ ^{m}Cₖ | 0.6 | 104 | |
| | | 1.8 | 74 | |
| 812133 | Ole-HA-T_{do} ^{m}C_{do} A_{do} Gₖₛ ^{m}Cₖₛ Aₖₛ | 0.2 | 71 | 213 |
| | T_{ds} T_{ds} ^{m}C_{ds} T_{ds} A_{ds} A_{ds} T_{ds} A_{ds} G_{ds} | 0.6 | 61 | |
| | ^{m}C_{ds} Aₖₛ Gₖₛ ^{m}Cₖ | 1.8 | 42 | |
| 812134 | C16-HA-T_{do} ^{m}C_{do} A_{do} Gₖₛ ^{m}Cₖₛ Aₖₛ | 0.2 | 86 | 213 |
| | T_{ds} T_{ds} ^{m}C_{ds} T_{ds} A_{ds} A_{ds} T_{ds} A_{ds} G_{ds} | 0.6 | 65 | |
| | ^{m}C_{ds} Aₖₛ Gₖₛ ^{m}Cₖ | 1.8 | 31 | |

Subscript “k” represents a cEt modified bicyclic sugar moiety. See above Tables for additional subscripts and superscript. The structure of “C16-HA-”, is shown in Example 2.

The structure of “Ole-HA-” is:

[chemical structure]

### Example 10: Effects of Oligomeric Compounds Comprising a Lipophilic Conjugate Group In Vivo Following Different Routes of Administration

[0345] The effects of Isis Numbers 556089 and 812134 (see Example 9) on MALAT-1 expression were tested in vivo. Male, wild type C57bl/6 mice each received either an intravenous (IV) injection, via the tail vein, or a subcutaneous (SC) injection of Isis No. 556089, Isis No. 812134, or saline vehicle alone. Each treatment group consisted of four mice. Three days after the injection, the animals were sacrificed. MALAT-1 RNA expression analyzed from heart by RT-qPCR and normalized to total RNA using RiboGreen (Thermo Fisher Scientific, Carlsbad, Calif.) is shown below. The average results for each group are shown as the percent normalized MALAT-1 RNA levels relative to average results for the vehicle treated animals. The data below show that the oligomeric compound comprising a lipophilic conjugate group was more potent in the heart compared to the parent compound that does not comprise a lipophilic conjugate group.

TABLE 15
MALAT-1 expression in vivo

| | | | MALAT-1 RNA | |
|---|---|---|---|---|
| Isis | Dosage | Route of | level in heart | SEQ ID |
| No. | (μmol/kg) | administration | (% Vehicle) | NO. |
| 556089 | 0.4 | SC | 85 | 212 |
| | 1.2 | SC | 79 | |
| | 3.6 | SC | 53 | |
| | | IV | 56 | |
| 812134 | 0.4 | SC | 71 | 212 |
| | 1.2 | SC | 48 | |
| | 3.6 | SC | 29 | |
| | | IV | 30 | |

### Example 11: Effects of Oligomeric Compounds Comprising a Lipophilic Conjugate Group In Vivo Following Different Routes of Administration

[0346] The compounds listed in the table below are complementary to CD36 and were tested in vivo. Female, wild type C57bl/6 mice each received either an intravenous injection or an intraperitoneal injection of a compound or saline vehicle alone once per week for three weeks. Each treatment group consisted of four mice. Three days after the final injection, the animals were sacrificed. CD36 mRNA expression analyzed from heart and quadriceps by RT-qPCR and normalized to total RNA using RiboGreen (Thermo Fisher Scientific, Carlsbad, Calif.) is shown below. The average results for each group are shown as the percent normalized CD36 RNA levels relative to average results for the vehicle treated animals. The data below show that the oligomeric compound comprising a lipophilic conjugate group was more potent in both heart and quadriceps compared to the parent compound that does not comprise a lipophilic conjugate group.

TABLE 16
CD36 expression in vivo

| | | | | CD36 mRNA | | |
|---|---|---|---|---|---|---|
| | | | | level | | |
| | | Dose | Route of | (% Vehicle) | | SEQ |
| Isis No. | Sequence (5′ to 3′) | (μmol/kg/week) | administration | Heart | Quad | ID NO. |
| 583363 | Aₖₛ Gₖₛ Gₖₛ A_{ds} T_{ds} A_{ds} T_{ds} | 1 | IV | 102 | 84 | 214 |
| | G_{ds} G_{ds} A_{ds} A_{ds} ^{m}C_{ds} ^{m}C_{ds} | 3 | IV | 98 | 69 | |
| | Aₖₛ Aₖₛ Aₖ | 9 | IV | 81 | 30 | |
| | | | IP | 94 | 36 | |
| 847939 | C16-HA-T_{do} ^{m}C_{do} A_{do} Aₖₛ | 1 | IV | 94 | 37 | 215 |
| | Gₖₛ Gₖₛ A_{ds} T_{ds} A_{ds} T_{ds} G_{ds} | 3 | IV | 69 | 22 | |
| | G_{ds} A_{ds} A_{ds} ^{m}C_{ds} ^{m}C_{ds} Aₖₛ | 9 | IV | 28 | 9 | |
| | Aₖₛ Aₖ | | IP | 52 | 21 | |

See tables above for legend.

### Example 12: Effects of Oligomeric Compounds Comprising a Lipophilic Conjugate Group In Vivo

[0347] The oligomeric compounds described in the table below are complementary to both human and mouse Dystrophia Myotonica-Protein Kinase (DMPK) transcript. Their effects on DMPK expression were tested in vivo. Wild type Balb/c mice each received an intravenous injection of an oligomeric compound at a dosage listed in the table below or saline vehicle alone. Each animal received one dose per week for 3½ weeks, for a total of 4 doses. Each treatment group consisted of three or four mice. Two days after the last dose, the animals were sacrificed. DMPK mRNA expression analyzed from quadriceps by RT-qPCR and normalized to total RNA using RiboGreen (Thermo Fisher Scientific, Carlsbad, Calif.) is shown below. The average results for each group are shown as the percent normalized DMPK RNA levels relative to average results for the vehicle treated animals. An entry of “nd” means no data. The data below show that the oligomeric compounds comprising a lipophilic conjugate group were more potent in the quadriceps compared to the parent compound that does not comprise a lipophilic conjugate group.

TABLE 17
DMPK expression in vivo

| | | Dosage | DMPK mRNA level | SEQ |
|---|---|---|---|---|
| Isis No. | Sequence (5′ to 3′) | (mg/kg/week) | in quad (% Vehicle) | ID NO. |
| 486178 | Aₖₛ ^{m}Cₖₛ Aₖₛ A_{ds} T_{ds} A_{ds} A_{ds} A_{ds} T_{ds} A_{ds} | 12.5 | 50 | 216 |
| | ^{m}C_{ds} ^{m}C_{ds} G_{ds} Aₖₛ Gₖₛ Gₖ | 25 | 33 | |
| | | 50 | 14 | |
| 819733 | Chol-TEG-T_{ds} ^{m}C_{do} A_{do} Aₖₛ ^{m}Cₖₛ Aₖₛ A_{ds} | 12.5 | 8 | 217 |
| | T_{ds} A_{ds} A_{ds} A_{ds} T_{ds} A_{ds} ^{m}C_{ds} ^{m}C_{ds} G_{ds} Aₖₛ | 25 | nd | |
| | Gₖₛ Gₖ | 50 | nd | |
| 819734 | Toco-TEG-T_{ds} ^{m}C_{do} A_{do} Aₖₛ ^{m}Cₖₛ Aₖₛ Adₛ | 12.5 | 15 | 217 |
| | T_{ds} A_{ds} A_{ds} A_{ds} T_{ds} A_{ds} ^{m}C_{ds} ^{m}C_{ds} G_{ds} Aₖₛ | 25 | 10 | |
| | Gₖₛ Gₖ | 50 | 5 | |

See tables above for legend. The structures of “Chol-TEG-” and “Toco-TEG-” are shown in Examples 1 and 2, respectively.

“HA-Chol” is a 2′-modification shown below:

[chemical structure]

“HA-C10” and “HA-C16” are 2′-modifications shown below:

[chemical structure]

wherein n is 1 in subscript “HA-C10”, and n is 7 in subscript “HA-C16”.

### Example 13: Effects of Oligomeric Compounds In Vivo

[0348] The oligomeric compounds described in the table below are complementary to both human and mouse MALAT-1 transcripts. Their effects on MALAT-1 expression were tested in vivo. Wild type male C57bl/6 mice each received a subcutaneous injection of an oligomeric compound at a dose listed in the table below or saline vehicle alone on days 0, 4, and 10 of the treatment period. Each treatment group consisted of three mice. Four days after the last injection, the animals were sacrificed. MALAT-1 RNA expression analyzed from heart by RT-qPCR and normalized to total RNA using RiboGreen (Thermo Fisher Scientific, Carlsbad, Calif.) is shown below. The average results for each group are shown as the percent normalized MALAT-1 RNA levels relative to average results for the vehicle treated animals. The data below show that the oligomeric compounds comprising a lipophilic conjugate group were more potent in the heart compared to the parent compound that does not comprise a lipophilic conjugate group.

TABLE 18
MALAT-1 expression in vivo

| | | Dosage | MALAT-1 RNA level | SEQ ID |
|---|---|---|---|---|
| Isis No. | Sequence (5′ to 3′) | (μmol/kg) | in heart (% Vehicle) | NO. |
| 556089 | Gₖₛ ^{m}Cₖₛ Aₖₛ T_{ds} T_{ds} ^{m}C_{ds} T_{ds} A_{ds} A_{ds} T_{ds} A_{ds} | 0.4 | 83 | 212 |
| | G_{ds} ^{m}C_{ds} Aₖₛ Gₖₛ ^{m}Cₖ | 1.2 | 81 | |
| | | 3.6 | 57 | |
| | | 10.8 | 27 | |
| 812134 | C16-HA-T_{do} ^{m}C_{do} A_{do} Gₖₛ ^{m}Cₖₛ Aₖₛ T_{ds} T_{ds} | 0.4 | 88 | 213 |
| | ^{m}C_{ds} T_{ds} A_{ds} A_{ds} T_{ds} A_{ds} G_{ds} ^{m}C_{ds} Aₖₛ Gₖₛ ^{m}Cₖ | 1.2 | 69 | |
| | | 3.6 | 17 | |
| 859299 | C16-HA-Gₖₛ ^{m}Cₖₛ Aₖₛ T_{ds} T_{ds} ^{m}C_{ds} T_{ds} A_{ds} A_{ds} | 0.4 | 80 | 212 |
| | T_{ds} A_{ds} G_{ds} ^{m}C_{ds} Aₖₛ Gₖₛ ^{m}Cₖ | 1.2 | 42 | |
| | | 3.6 | 14 | |
| 861242 | C16-2x-C6-Gₖₛ ^{m}Cₖₛ Aₖₛ T_{ds} T_{ds} ^{m}C_{ds} T_{ds} A_{ds} | 0.4 | 78 | 212 |
| | A_{ds} T_{ds} A_{ds} G_{ds} ^{m}C_{ds} Aₖₛ Gₖₛ ^{m}Cₖ | 1.2 | 45 | |
| | | 3.6 | 13 | |
| 861244 | C16-C6-Gₖₛ ^{m}Cₖₛ Aₖₛ T_{ds} T_{ds} ^{m}C_{ds} T_{ds} A_{ds} A_{ds} | 0.4 | 76 | 212 |
| | T_{ds} A_{ds} G_{ds} ^{m}C_{ds} Aₖₛ Gₖₛ ^{m}Cₖ | 1.2 | 67 | |
| | | 3.6 | 18 | |
| 863406 | C16-2x-C3-Gₖₛ ^{m}Cₖₛ Aₖₛ T_{ds} T_{ds} ^{m}C_{ds} T_{ds} A_{ds} | 0.4 | 97 | 212 |
| | A_{ds} T_{ds} A_{ds} G_{ds} ^{m}C_{ds} Aₖₛ Gₖₛ ^{m}Cₖ | 1.2 | 63 | |
| | | 3.6 | 26 | |
| 863407 | C16-C3-Ab-Gₖₛ ^{m}Cₖₛ Aₖₛ T_{ds} T_{ds} ^{m}C_{ds} T_{ds} A_{ds} | 0.4 | 109 | 212 |
| | A_{ds} T_{ds} A_{ds} G_{ds} ^{m}C_{ds} Aₖₛ Gₖₛ ^{m}Cₖ | 1.2 | 67 | |
| | | 3.6 | 32 | |

See tables above for legend. The structure of “C16-HA-” is shown in Example 2.

The structures of “C16-2x-C6-” and “C16-2x-C3-” are:

[chemical structure]

wherein m=2 in “C16-2x-C6-”; and m=1 in “C16-2x-C3-”;
the structure of “C16-C6-” is:

[chemical structure]

and the structure of “C16-C3-Ab-” is:

[chemical structure]

### Example 14: Effect of Oligomeric Compounds Comprising 2′-NMA Modified Oligonucleotides Complementary to DMD Following Subcutaneous Administration

[0349] Oligomeric compounds comprising modified oligonucleotides, shown in the table below, were tested in DMD^{mdx} mice to assess their effects on splicing of exon 23 of dystrophin (DMD). Each mouse received subcutaneous injections of saline (PBS) or a compound in the table below in PBS. Each treatment group consisted of 4 female mice. Each animal received two doses of 200 mg/kg and one dose of 100 mg/kg during the first week of dosing. During the second and third weeks, each animal received one dose of 200 mg/kg per week, for a total of 900 mg/kg over the course of 3 weeks. The mice were sacrificed 48 hours after the final dose. Total RNA was extracted from the quadricep and analyzed by as described in Example 14. The percentage of exon 23 skipping that occurred relative to total dystrophin mRNA levels is shown in the table below. The results indicate that the oligomeric compound comprising a 2′-NMA modified oligonucleotide exhibited greater exon skipping than the oligomeric compound comprising a 2′-MOE modified oligonucleotide. The oligomeric compounds comprising a C16 conjugate group exhibited greater exon skipping in muscle tissue than the compound lacking the C16 conjugate group.

TABLE 19
Exon skipping by oligomeric compounds comprising modified oligonucleotides complementary to
mouse dystrophin pre-mRNA

| | | Exon 23 | |
|---|---|---|---|
| Isis/Ion | | skipping | SEQ ID |
| No. | Sequence (5′ to 3′) | (%) | NO. |
| PBS | n/a | 0.0 | — |
| 439778 | Gₑₛ Gₑₛ ^{m}Cₑₛ ^{m}Cₑₛ Aₑₛ Aₑₛ Aₑₛ ^{m}Cₑₛ ^{m}Cₑₛ Tₑₛ ^{m}Cₑₛ Gₑₛ Gₑₛ ^{m}Cₑₛ Tₑₛ Tₑₛ | 0.0 | 211 |
| | Aₑₛ ^{m}Cₑₛ ^{m}Cₑₛ Tₑ | | |
| 992331 | C16-HA-Gₑₛ Gₑₛ ^{m}Cₑₛ ^{m}Cₑₛ Aₑₛ Aₑₛ Aₑₛ ^{m}Cₑₛ ^{m}Cₑₛ Tₑₛ ^{m}Cₑₛ Gₑₛ Gₑₛ | 25.5 | 211 |
| | ^{m}Cₑₛ Tₑₛ Tₑₛ Aₑₛ ^{m}Cₑₛ ^{m}Cₑₛ Tₑ | | |
| 992332 | C16-HA-Gₙₛ Gₙₛ ^{m}Cₙₛ ^{m}Cₙₛ Aₙₛ Aₙₛ Aₙₛ ^{m}Cₙₛ ^{m}Cₙₛ Tₙₛ ^{m}Cₙₛ Gₙₛ Gₙₛ | 39.3 | 211 |
| | ^{m}Cₙₛ Tₙₛ Tₙₛ Aₙₛ ^{m}Cₙₛ ^{m}Cₙₛ Tₙ | | |

Subscripts in the table above: “s” represents a phosphorothioate internucleoside linkage, “n” represents a 2′-O-(N-methyl acetamide) modified nucleoside, “e” represents a 2′-methoxy ethyl (MOE) modified nucleoside.
Superscripts: “m” before a C represents a 5-methylcytosine. The structure of C16-HA is shown in Example 6.

The application's sequence listing, which the Patent Office published only in electronic form, follows.

SEQUENCE LISTING (228 sequences)

SEQ ID NO: 1 - DNA, 21 bp, Artificial sequence
  Primer
cagccatccatttctgtaagg

SEQ ID NO: 2 - DNA, 21 bp, Artificial sequence
  Primer
atccagcagtcagaaagcaaa

SEQ ID NO: 3 - RNA, 24 nt, Artificial sequence
  Synthetic oligonucleotide
cccauuuugugaauguuuucuuuu

SEQ ID NO: 4 - RNA, 19 nt, Artificial sequence
  Synthetic oligonucleotide
cuuccuggauggcuucaau

SEQ ID NO: 5 - RNA, 19 nt, Artificial sequence
  Synthetic oligonucleotide
guacauuaagauggacuuc

SEQ ID NO: 6 - RNA, 19 nt, Artificial sequence
  Synthetic oligonucleotide
cuguagcuucacccuuucc

SEQ ID NO: 7 - RNA, 19 nt, Artificial sequence
  Synthetic oligonucleotide
cgccgccauuucucaacag

SEQ ID NO: 8 - RNA, 20 nt, Artificial sequence
  Synthetic oligonucleotide
uuuguauuuagcauguuccc

SEQ ID NO: 9 - RNA, 17 nt, Artificial sequence
  Synthetic oligonucleotide
ccgccauuucucaacag

SEQ ID NO: 10 - RNA, 21 nt, Artificial sequence
  Synthetic oligonucleotide
uucucaggaauuugugucuuu

SEQ ID NO: 11 - RNA, 20 nt, Artificial sequence
  Synthetic oligonucleotide
guugcauucaauguucugac

SEQ ID NO: 12 - RNA, 20 nt, Artificial sequence
  Synthetic oligonucleotide
gcuuuucuuuuaguugcugc

SEQ ID NO: 13 - RNA, 20 nt, Artificial sequence
  Synthetic oligonucleotide
uccagguucaagugggauac

SEQ ID NO: 14 - RNA, 15 nt, Artificial sequence
  Synthetic oligonucleotide
uuccagguucaagug

SEQ ID NO: 15 - RNA, 19 nt, Artificial sequence
  Synthetic oligonucleotide
agguucaagugggauacua

SEQ ID NO: 16 - RNA, 17 nt, Artificial sequence
  Synthetic oligonucleotide
cucagagcucagaucuu

SEQ ID NO: 17 - RNA, 20 nt, Artificial sequence
  Synthetic oligonucleotide
ucaaggaagauggcauuucu

SEQ ID NO: 18 - RNA, 23 nt, Artificial sequence
  Synthetic oligonucleotide
ccucugugauuuuauaacuugau

SEQ ID NO: 19 - RNA, 20 nt, Artificial sequence
  Synthetic oligonucleotide
ugauauccucaaggucaccc

SEQ ID NO: 20 - RNA, 18 nt, Artificial sequence
  Synthetic oligonucleotide
gcuggucuuguuuuucaa

SEQ ID NO: 21 - DNA, 15 bp, Artificial sequence
  Synthetic oligonucleotide
ctgcttcctccaacc

SEQ ID NO: 22 - DNA, 20 bp, Artificial sequence
  Synthetic oligonucleotide
gttatctgcttcctccaacc

SEQ ID NO: 23 - DNA, 20 bp, Artificial sequence
  Synthetic oligonucleotide
gcttttcttttagttgctgc

SEQ ID NO: 24 - DNA, 15 bp, Artificial sequence
  Synthetic oligonucleotide
ttagttgctgctctt

SEQ ID NO: 25 - DNA, 15 bp, Artificial sequence
  Synthetic oligonucleotide
ttgctgctcttttcc

SEQ ID NO: 26 - DNA, 19 bp, Artificial sequence
  Synthetic oligonucleotide
ccacaggttgtgtcaccag

SEQ ID NO: 27 - DNA, 21 bp, Artificial sequence
  Synthetic oligonucleotide
tttccttagtaaccacaggtt

SEQ ID NO: 28 - DNA, 17 bp, Artificial sequence
  Synthetic oligonucleotide
tggcatttctagtttgg

SEQ ID NO: 29 - DNA, 23 bp, Artificial sequence
  Synthetic oligonucleotide
ccagagcaggtacctccaacatc

SEQ ID NO: 30 - DNA, 20 bp, Artificial sequence
  Synthetic oligonucleotide
ggtaagttctgtccaagccc

SEQ ID NO: 31 - DNA, 19 bp, Artificial sequence
  Synthetic oligonucleotide
tcaccctctgtgattttat

SEQ ID NO: 32 - DNA, 14 bp, Artificial sequence
  Synthetic oligonucleotide
ccctctgtgatttt

SEQ ID NO: 33 - DNA, 17 bp, Artificial sequence
  Synthetic oligonucleotide
tcacccaccatcaccct

SEQ ID NO: 34 - DNA, 20 bp, Artificial sequence
  Synthetic oligonucleotide
tgatatcctcaaggtcaccc

SEQ ID NO: 35 - DNA, 21 bp, Artificial sequence
  Synthetic oligonucleotide
ctgcttgatgatcatctcgtt

SEQ ID NO: 36 - RNA, 19 nt, Artificial sequence
  Synthetic oligonucleotide
gccauuucucaacagaucu

SEQ ID NO: 37 - RNA, 20 nt, Artificial sequence
  Synthetic oligonucleotide
ucagcuucuguuagccacug

SEQ ID NO: 38 - RNA, 23 nt, Artificial sequence
  Synthetic oligonucleotide
auucucaggaauuugugucuuuc

SEQ ID NO: 39 - RNA, 23 nt, Artificial sequence
  Synthetic oligonucleotide
ccauuuguauuuagcauguuccc

SEQ ID NO: 40 - RNA, 21 nt, Artificial sequence
  Synthetic oligonucleotide
ucucaggaauuugugucuuuc

SEQ ID NO: 41 - RNA, 23 nt, Artificial sequence
  Synthetic oligonucleotide
gccauuucucaacagaucuguca

SEQ ID NO: 42 - RNA, 18 nt, Artificial sequence
  Synthetic oligonucleotide
gccgccauuucucaacag

SEQ ID NO: 43 - RNA, 18 nt, Artificial sequence
  Synthetic oligonucleotide
guucagcuucuguuagcc

SEQ ID NO: 44 - RNA, 25 nt, Artificial sequence
  Synthetic oligonucleotide
guugccuccgguucugaagguguuc

SEQ ID NO: 45 - RNA, 25 nt, Artificial sequence
  Synthetic oligonucleotide
uuugccgcugcccaaugccauccug

SEQ ID NO: 46 - RNA, 25 nt, Artificial sequence
  Synthetic oligonucleotide
cucuugauugcuggucuuguuuuuc

SEQ ID NO: 47 - RNA, 22 nt, Artificial sequence
  Synthetic oligonucleotide
gguaaugaguucuuccaacugg

SEQ ID NO: 48 - RNA, 25 nt, Artificial sequence
  Synthetic oligonucleotide
auucaauguucugacaacaguuugc

SEQ ID NO: 49 - RNA, 25 nt, Artificial sequence
  Synthetic oligonucleotide
ccaguugcauucaauguucugacaa

SEQ ID NO: 50 - RNA, 22 nt, Artificial sequence
  Synthetic oligonucleotide
caguugcauucaauguucugac

SEQ ID NO: 51 - RNA, 20 nt, Artificial sequence
  Synthetic oligonucleotide
aguugcauucaauguucuga

SEQ ID NO: 52 - RNA, 21 nt, Artificial sequence
  Synthetic oligonucleotide
gauugcugaauuauuucuucc

SEQ ID NO: 53 - RNA, 25 nt, Artificial sequence
  Synthetic oligonucleotide
  misc_feature (7)..(7): N = Inosine
uuugccncugcccaaugccauccug

SEQ ID NO: 54 - RNA, 20 nt, Artificial sequence
  Synthetic oligonucleotide
cgaccugagcuuuguuguag

SEQ ID NO: 55 - RNA, 23 nt, Artificial sequence
  Synthetic oligonucleotide
cguugcacuuugcaaugcugcug

SEQ ID NO: 56 - RNA, 25 nt, Artificial sequence
  Synthetic oligonucleotide
agcaauguuaucugcuuccuccaac

SEQ ID NO: 57 - RNA, 20 nt, Artificial sequence
  Synthetic oligonucleotide
ucuuuuccagguucaagugg

SEQ ID NO: 58 - RNA, 25 nt, Artificial sequence
  Synthetic oligonucleotide
gcuuuucuuuuaguugcugcucuuu

SEQ ID NO: 59 - RNA, 25 nt, Artificial sequence
  Synthetic oligonucleotide
ggauacuagcaauguuaucugcuuc

SEQ ID NO: 60 - RNA, 21 nt, Artificial sequence
  Synthetic oligonucleotide
auaguggucaguccaggagcu

SEQ ID NO: 61 - RNA, 25 nt, Artificial sequence
  Synthetic oligonucleotide
ucaaggaagauggcauuucuaguuu

SEQ ID NO: 62 - RNA, 25 nt, Artificial sequence
  Synthetic oligonucleotide
uuccaacuggggacgccucuguucc

SEQ ID NO: 63 - RNA, 25 nt, Artificial sequence
  Synthetic oligonucleotide
accugcucagcuucuuccuuagcuu

SEQ ID NO: 64 - RNA, 24 nt, Artificial sequence
  Synthetic oligonucleotide
gauaggugguaucaacaucuguaa

SEQ ID NO: 65 - RNA, 21 nt, Artificial sequence
  Synthetic oligonucleotide
gauaggugguaucaacaucug

SEQ ID NO: 66 - RNA, 25 nt, Artificial sequence
  Synthetic oligonucleotide
gauaggugguaucaacaucuguaag

SEQ ID NO: 67 - RNA, 25 nt, Artificial sequence
  Synthetic oligonucleotide
uauguguuaccuacccuugucgguc

SEQ ID NO: 68 - RNA, 20 nt, Artificial sequence
  Synthetic oligonucleotide
ggagagagcuuccuguagcu

SEQ ID NO: 69 - RNA, 23 nt, Artificial sequence
  Synthetic oligonucleotide
ucacccuuuccacaggcguugca

SEQ ID NO: 70 - RNA, 30 nt, Artificial sequence
  Synthetic oligonucleotide
cucuuuuccagguucaagugggauacuagc

SEQ ID NO: 71 - RNA, 31 nt, Artificial sequence
  Synthetic oligonucleotide
caagcuuuucuuuuaguugcugcucuuuucc

SEQ ID NO: 72 - RNA, 29 nt, Artificial sequence
  Synthetic oligonucleotide
ccacucagagcucagaucuucuaacuucc

SEQ ID NO: 73 - RNA, 27 nt, Artificial sequence
  Synthetic oligonucleotide
cuuccacucagagcucagaucuucuaa

SEQ ID NO: 74 - RNA, 25 nt, Artificial sequence
  Synthetic oligonucleotide
gggauccaguauacuuacaggcucc

SEQ ID NO: 75 - RNA, 30 nt, Artificial sequence
  Synthetic oligonucleotide
acaucaaggaagauggcauuucuaguuugg

SEQ ID NO: 76 - RNA, 25 nt, Artificial sequence
  Synthetic oligonucleotide
acaucaaggaagauggcauuucuag

SEQ ID NO: 77 - RNA, 30 nt, Artificial sequence
  Synthetic oligonucleotide
cuccaacaucaaggaagauggcauuucuag

SEQ ID NO: 78 - RNA, 30 nt, Artificial sequence
  Synthetic oligonucleotide
uccaacuggggacgccucuguuccaaaucc

SEQ ID NO: 79 - RNA, 21 nt, Artificial sequence
  Synthetic oligonucleotide
acuggggacgccucuguucca

SEQ ID NO: 80 - RNA, 31 nt, Artificial sequence
  Synthetic oligonucleotide
cauucaacuguugccuccgguucugaaggug

SEQ ID NO: 81 - DNA, 15 bp, Artificial sequence
  Synthetic oligonucleotide
gccgctgcccaatgc

SEQ ID NO: 82 - DNA, 18 bp, Artificial sequence
  Synthetic oligonucleotide
cgctgcccaatgccatcc

SEQ ID NO: 83 - DNA, 18 bp, Artificial sequence
  Synthetic oligonucleotide
cagtttgccgctgcccaa

SEQ ID NO: 84 - DNA, 18 bp, Artificial sequence
  Synthetic oligonucleotide
tgttctgacaacagtttg

SEQ ID NO: 85 - DNA, 22 bp, Artificial sequence
  Synthetic oligonucleotide
cttttagttgctgctcttttcc

SEQ ID NO: 86 - DNA, 18 bp, Artificial sequence
  Synthetic oligonucleotide
ttttccaggttcaagtgg

SEQ ID NO: 87 - DNA, 18 bp, Artificial sequence
  Synthetic oligonucleotide
  misc_feature (1)..(13): bases at these positions are RNA
  misc_feature (15)..(17): bases at these positions are RNA
gaaaacgccgccatuuct

SEQ ID NO: 88 - DNA, 18 bp, Artificial sequence
  Synthetic oligonucleotide
  misc_feature (1)..(1): bases at these positions are RNA
  misc_feature (3)..(4): bases at these positions are RNA
  misc_feature (6)..(11): bases at these positions are RNA
  misc_feature (13)..(14): bases at these positions are RNA
  misc_feature (17)..(18): bases at these positions are RNA
ctgutagccactgattaa

SEQ ID NO: 89 - DNA, 18 bp, Artificial sequence
  Synthetic oligonucleotide
  misc_feature (2)..(8): bases at these positions are RNA
  misc_feature (10)..(10): bases at these positions are RNA
  misc_feature (12)..(17): bases at these positions are RNA
tgagaaactgtucagcut

SEQ ID NO: 90 - DNA, 18 bp, Artificial sequence
  Synthetic oligonucleotide
  misc_feature (1)..(6): bases at these positions are RNA
  misc_feature (9)..(10): bases at these positions are RNA
  misc_feature (12)..(16): bases at these positions are RNA
  misc_feature (18)..(18): bases at these positions are RNA
caggaattugtgucuutc

SEQ ID NO: 91 - DNA, 18 bp, Artificial sequence
  Synthetic oligonucleotide
  misc_feature (1)..(1): bases at these positions are RNA
  misc_feature (3)..(4): bases at these positions are RNA
  misc_feature (7)..(10): bases at these positions are RNA
  misc_feature (12)..(13): bases at these positions are RNA
  misc_feature (15)..(18): bases at these positions are RNA
gtauttagcatgutccca

SEQ ID NO: 92 - DNA, 18 bp, Artificial sequence
  Synthetic oligonucleotide
  misc_feature (1)..(4): bases at these positions are RNA
  misc_feature (6)..(6): bases at these positions are RNA
  misc_feature (9)..(13): bases at these positions are RNA
  misc_feature (15)..(16): bases at these positions are RNA
  misc_feature (18)..(18): bases at these positions are RNA
agcatgttcccaatuctc

SEQ ID NO: 93 - DNA, 18 bp, Artificial sequence
  Synthetic oligonucleotide
  misc_feature (1)..(7): bases at these positions are RNA
  misc_feature (9)..(18): bases at these positions are RNA
gccgccatuucucaacag

SEQ ID NO: 94 - DNA, 18 bp, Artificial sequence
  Synthetic oligonucleotide
cataatgaaaacgccgcc

SEQ ID NO: 95 - DNA, 18 bp, Artificial sequence
  Synthetic oligonucleotide
  misc_feature (2)..(7): bases at these positions are RNA
  misc_feature (9)..(10): bases at these positions are RNA
  misc_feature (12)..(17): bases at these positions are RNA
tucccaatuctcaggaat

SEQ ID NO: 96 - DNA, 18 bp, Artificial sequence
  Synthetic oligonucleotide
  misc_feature (1)..(4): bases at these positions are RNA
  misc_feature (6)..(7): bases at these positions are RNA
  misc_feature (9)..(10): bases at these positions are RNA
  misc_feature (13)..(16): bases at these positions are RNA
  misc_feature (18)..(18): bases at these positions are RNA
ccautugtauttagcatg

SEQ ID NO: 97 - DNA, 18 bp, Artificial sequence
  Synthetic oligonucleotide
  misc_feature (1)..(1): bases at these positions are RNA
  misc_feature (3)..(6): bases at these positions are RNA
  misc_feature (8)..(11): bases at these positions are RNA
  misc_feature (13)..(18): bases at these positions are RNA
ctcagatcuuctaacuuc

SEQ ID NO: 98 - DNA, 18 bp, Artificial sequence
  Synthetic oligonucleotide
  misc_feature (1)..(6): bases at these positions are RNA
  misc_feature (8)..(12): bases at these positions are RNA
  misc_feature (14)..(18): bases at these positions are RNA
accgcctuccactcagag

SEQ ID NO: 99 - DNA, 18 bp, Artificial sequence
  Synthetic oligonucleotide
  misc_feature (2)..(2): bases at these positions are RNA
  misc_feature (5)..(8): bases at these positions are RNA
  misc_feature (10)..(15): bases at these positions are RNA
  misc_feature (17)..(17): bases at these positions are RNA
tcttgaagtaaacggtut

SEQ ID NO: 100 - DNA, 18 bp, Artificial sequence
  Synthetic oligonucleotide
  misc_feature (1)..(3): bases at these positions are RNA
  misc_feature (5)..(6): bases at these positions are RNA
  misc_feature (9)..(13): bases at these positions are RNA
  misc_feature (15)..(18): bases at these positions are RNA
ggctgcttugccctcagc

SEQ ID NO: 101 - DNA, 18 bp, Artificial sequence
  Synthetic oligonucleotide
agtccaggagctaggtca

SEQ ID NO: 102 - DNA, 18 bp, Artificial sequence
  Synthetic oligonucleotide
gctccaatagtggtcagt

SEQ ID NO: 103 - DNA, 18 bp, Artificial sequence
  Synthetic oligonucleotide
  misc_feature (1)..(2): bases at these positions are RNA
  misc_feature (4)..(6): bases at these positions are RNA
  misc_feature (8)..(12): bases at these positions are RNA
  misc_feature (14)..(15): bases at these positions are RNA
  misc_feature (18)..(18): bases at these positions are RNA
gctaggtcaggctgcttu

SEQ ID NO: 104 - DNA, 20 bp, Artificial sequence
  Synthetic oligonucleotide
  misc_feature (2)..(2): bases at these positions are RNA
  misc_feature (4)..(4): bases at these positions are RNA
  misc_feature (6)..(19): bases at these positions are RNA
tgtgtcaccagaguaacagt

SEQ ID NO: 105 - DNA, 20 bp, Artificial sequence
  Synthetic oligonucleotide
  misc_feature (1)..(3): bases at these positions are RNA
  misc_feature (6)..(17): bases at these positions are RNA
  misc_feature (19)..(20): bases at these positions are RNA
aggttgugucaccagagtaa

SEQ ID NO: 106 - DNA, 20 bp, Artificial sequence
  Synthetic oligonucleotide
  misc_feature (1)..(2): bases at these positions are RNA
  misc_feature (4)..(15): bases at these positions are RNA
  misc_feature (17)..(17): bases at these positions are RNA
  misc_feature (19)..(20): bases at these positions are RNA
agtaaccacagguugtgtca

SEQ ID NO: 107 - DNA, 20 bp, Artificial sequence
  Synthetic oligonucleotide
ttgatcaagcagagaaagcc

SEQ ID NO: 108 - DNA, 20 bp, Artificial sequence
  Synthetic oligonucleotide
  misc_feature (1)..(15): bases at these positions are RNA
  misc_feature (17)..(17): bases at these positions are RNA
  misc_feature (19)..(20): bases at these positions are RNA
cacccucugugauuutataa

SEQ ID NO: 109 - DNA, 20 bp, Artificial sequence
  Synthetic oligonucleotide
  misc_feature (1)..(16): bases at these positions are RNA
  misc_feature (18)..(18): bases at these positions are RNA
  misc_feature (20)..(20): bases at these positions are RNA
acccaccaucacccuctgtg

SEQ ID NO: 110 - DNA, 20 bp, Artificial sequence
  Synthetic oligonucleotide
  misc_feature (1)..(2): bases at these positions are RNA
  misc_feature (4)..(18): bases at these positions are RNA
  misc_feature (20)..(20): bases at these positions are RNA
cctcaaggucacccaccatc

SEQ ID NO: 111 - DNA, 18 bp, Artificial sequence
  Synthetic oligonucleotide
  misc_feature (2)..(20): bases at these positions are RNA
taacagucugaguaggag

SEQ ID NO: 112 - DNA, 18 bp, Artificial sequence
  Synthetic oligonucleotide
  misc_feature (1)..(4): bases at these positions are RNA
  misc_feature (6)..(13): bases at these positions are RNA
  misc_feature (15)..(18): bases at these positions are RNA
ggcatuucuaguutggag

SEQ ID NO: 113 - DNA, 18 bp, Artificial sequence
  Synthetic oligonucleotide
  misc_feature (1)..(14): bases at these positions are RNA
  misc_feature (17)..(17): bases at these positions are RNA
agccagucgguaagttct

SEQ ID NO: 114 - DNA, 18 bp, Artificial sequence
  Synthetic oligonucleotide
  misc_feature (1)..(2): bases at these positions are RNA
  misc_feature (6)..(16): bases at these positions are RNA
agtttggagauggcagtt

SEQ ID NO: 115 - DNA, 18 bp, Artificial sequence
  Synthetic oligonucleotide
  misc_feature (1)..(1): bases at these positions are RNA
  misc_feature (3)..(4): bases at these positions are RNA
  misc_feature (7)..(7): bases at these positions are RNA
  misc_feature (9)..(11): bases at these positions are RNA
  misc_feature (14)..(16): bases at these positions are RNA
  misc_feature (18)..(18): bases at these positions are RNA
ctgattctgaattcuutc

SEQ ID NO: 116 - DNA, 18 bp, Artificial sequence
  Synthetic oligonucleotide
ttcttgtacttcatccca

SEQ ID NO: 117 - DNA, 18 bp, Artificial sequence
  Synthetic oligonucleotide
  misc_feature (1)..(7): bases at these positions are RNA
  misc_feature (10)..(10): bases at these positions are RNA
  misc_feature (12)..(16): bases at these positions are RNA
  misc_feature (18)..(18): bases at these positions are RNA
ccuccggttctgaaggtg

SEQ ID NO: 118 - DNA, 18 bp, Artificial sequence
  Synthetic oligonucleotide
  misc_feature (1)..(2): bases at these positions are RNA
  misc_feature (5)..(8): bases at these positions are RNA
  misc_feature (10)..(13): bases at these positions are RNA
  misc_feature (15)..(15): bases at these positions are RNA
  misc_feature (18)..(18): bases at these positions are RNA
cattucautcaactgttg

SEQ ID NO: 119 - DNA, 18 bp, Artificial sequence
  Synthetic oligonucleotide
  misc_feature (3)..(4): bases at these positions are RNA
  misc_feature (7)..(9): bases at these positions are RNA
  misc_feature (11)..(18): bases at these positions are RNA
ttccttagctuccagcca

SEQ ID NO: 120 - DNA, 18 bp, Artificial sequence
  Synthetic oligonucleotide
  misc_feature (2)..(7): bases at these positions are RNA
  misc_feature (9)..(10): bases at these positions are RNA
  misc_feature (12)..(16): bases at these positions are RNA
  misc_feature (18)..(18): bases at these positions are RNA
taagacctgctcagcutc

SEQ ID NO: 121 - DNA, 18 bp, Artificial sequence
  Synthetic oligonucleotide
  misc_feature (1)..(1): bases at these positions are RNA
  misc_feature (4)..(6): bases at these positions are RNA
  misc_feature (8)..(8): bases at these positions are RNA
  misc_feature (10)..(13): bases at these positions are RNA
  misc_feature (15)..(18): bases at these positions are RNA
cttggctctggcctgucc

SEQ ID NO: 122 - DNA, 18 bp, Artificial sequence
  Synthetic oligonucleotide
  misc_feature (1)..(1): bases at these positions are RNA
  misc_feature (3)..(4): bases at these positions are RNA
  misc_feature (6)..(9): bases at these positions are RNA
  misc_feature (11)..(13): bases at these positions are RNA
  misc_feature (15)..(18): bases at these positions are RNA
ctcctuccatgactcaag

SEQ ID NO: 123 - DNA, 18 bp, Artificial sequence
  Synthetic oligonucleotide
ctgaaggtgttcttgtac

SEQ ID NO: 124 - DNA, 18 bp, Artificial sequence
  Synthetic oligonucleotide
ttccagccattgtgttga

SEQ ID NO: 125 - DNA, 18 bp, Artificial sequence
  Synthetic oligonucleotide
  misc_feature (1)..(1): bases at these positions are RNA
  misc_feature (3)..(6): bases at these positions are RNA
  misc_feature (8)..(9): bases at these positions are RNA
  misc_feature (12)..(13): bases at these positions are RNA
  misc_feature (16)..(18): bases at these positions are RNA
ctcagctucttccttagc

SEQ ID NO: 126 - DNA, 18 bp, Artificial sequence
  Synthetic oligonucleotide
  misc_feature (1)..(2): bases at these positions are RNA
  misc_feature (5)..(6): bases at these positions are RNA
  misc_feature (8)..(10): bases at these positions are RNA
  misc_feature (12)..(15): bases at these positions are RNA
  misc_feature (17)..(18): bases at these positions are RNA
gcttcutccutagcutcc

SEQ ID NO: 127 - DNA, 25 bp, Artificial sequence
  Synthetic oligonucleotide
ctccggttctgaaggtgttcttgta

SEQ ID NO: 128 - DNA, 22 bp, Artificial sequence
  Synthetic oligonucleotide
ccggttctgaaggtgttcttgt

SEQ ID NO: 129 - DNA, 25 bp, Artificial sequence
  Synthetic oligonucleotide
cctccggttctgaaggtgttcttgt

SEQ ID NO: 130 - DNA, 22 bp, Artificial sequence
  Synthetic oligonucleotide
tccggttctgaaggtgttcttg

SEQ ID NO: 131 - DNA, 25 bp, Artificial sequence
  Synthetic oligonucleotide
tgcctccggttctgaaggtgttctt

SEQ ID NO: 132 - DNA, 18 bp, Artificial sequence
  Synthetic oligonucleotide
ccggttctgaaggtgttc

SEQ ID NO: 133 - DNA, 20 bp, Artificial sequence
  Synthetic oligonucleotide
ctccggttctgaaggtgttc

SEQ ID NO: 134 - DNA, 21 bp, Artificial sequence
  Synthetic oligonucleotide
cctccggttctgaaggtgttc

SEQ ID NO: 135 - DNA, 22 bp, Artificial sequence
  Synthetic oligonucleotide
gcctccggttctgaaggtgttc

SEQ ID NO: 136 - RNA, 25 nt, Artificial sequence
  Synthetic oligonucleotide
uuguacuucaucccacugauucuga

SEQ ID NO: 137 - RNA, 25 nt, Artificial sequence
  Synthetic oligonucleotide
uguucuuguacuucaucccacugau

SEQ ID NO: 138 - RNA, 25 nt, Artificial sequence
  Synthetic oligonucleotide
guucugaagguguucuuguacuuca

SEQ ID NO: 139 - RNA, 25 nt, Artificial sequence
  Synthetic oligonucleotide
ccgguucugaagguguucuuguacu

SEQ ID NO: 140 - RNA, 25 nt, Artificial sequence
  Synthetic oligonucleotide
uccgguucugaagguguucuuguac

SEQ ID NO: 141 - RNA, 25 nt, Artificial sequence
  Synthetic oligonucleotide
cuccgguucugaagguguucuugua

SEQ ID NO: 142 - RNA, 18 nt, Artificial sequence
  Synthetic oligonucleotide
uucugaagguguucuugu

SEQ ID NO: 143 - RNA, 20 nt, Artificial sequence
  Synthetic oligonucleotide
gguucugaagguguucuugu

SEQ ID NO: 144 - RNA, 25 nt, Artificial sequence
  Synthetic oligonucleotide
ccuccgguucugaagguguucuugu

SEQ ID NO: 145 - RNA, 30 nt, Artificial sequence
  Synthetic oligonucleotide
uguugccuccgguucugaagguguucuugu

SEQ ID NO: 146 - RNA, 25 nt, Artificial sequence
  Synthetic oligonucleotide
gccuccgguucugaagguguucuug

SEQ ID NO: 147 - RNA, 25 nt, Artificial sequence
  Synthetic oligonucleotide
ugccuccgguucugaagguguucuu

SEQ ID NO: 148 - RNA, 15 nt, Artificial sequence
  Synthetic oligonucleotide
uucugaagguguucu

SEQ ID NO: 149 - RNA, 18 nt, Artificial sequence
  Synthetic oligonucleotide
cgguucugaagguguucu

SEQ ID NO: 150 - RNA, 20 nt, Artificial sequence
  Synthetic oligonucleotide
uccgguucugaagguguucu

SEQ ID NO: 151 - RNA, 25 nt, Artificial sequence
  Synthetic oligonucleotide
uugccuccgguucugaagguguucu

SEQ ID NO: 152 - RNA, 20 nt, Artificial sequence
  Synthetic oligonucleotide
ccuccgguucugaagguguu

SEQ ID NO: 153 - RNA, 25 nt, Artificial sequence
  Synthetic oligonucleotide
uguugccuccgguucugaagguguu

SEQ ID NO: 154 - RNA, 18 nt, Artificial sequence
  Synthetic oligonucleotide
cuccgguucugaaggugu

SEQ ID NO: 155 - RNA, 25 nt, Artificial sequence
  Synthetic oligonucleotide
cuguugccuccgguucugaaggugu

SEQ ID NO: 156 - RNA, 25 nt, Artificial sequence
  Synthetic oligonucleotide
acuguugccuccgguucugaaggug

SEQ ID NO: 157 - RNA, 15 nt, Artificial sequence
  Synthetic oligonucleotide
uccgguucugaaggu

SEQ ID NO: 158 - RNA, 20 nt, Artificial sequence
  Synthetic oligonucleotide
uugccuccgguucugaaggu

SEQ ID NO: 159 - RNA, 25 nt, Artificial sequence
  Synthetic oligonucleotide
aacuguugccuccgguucugaaggu

SEQ ID NO: 160 - RNA, 18 nt, Artificial sequence
  Synthetic oligonucleotide
ugccuccgguucugaagg

SEQ ID NO: 161 - RNA, 25 nt, Artificial sequence
  Synthetic oligonucleotide
caacuguugccuccgguucugaagg

SEQ ID NO: 162 - RNA, 20 nt, Artificial sequence
  Synthetic oligonucleotide
uguugccuccgguucugaag

SEQ ID NO: 163 - RNA, 18 nt, Artificial sequence
  Synthetic oligonucleotide
uguugccuccgguucuga

SEQ ID NO: 164 - RNA, 15 nt, Artificial sequence
  Synthetic oligonucleotide
uugccuccgguucug

SEQ ID NO: 165 - RNA, 18 nt, Artificial sequence
  Synthetic oligonucleotide
cuguugccuccgguucug

SEQ ID NO: 166 - RNA, 25 nt, Artificial sequence
  Synthetic oligonucleotide
ucauucaacuguugccuccgguucu

SEQ ID NO: 167 - RNA, 25 nt, Artificial sequence
  Synthetic oligonucleotide
uuggcucuggccuguccuaagaccu

SEQ ID NO: 168 - RNA, 25 nt, Artificial sequence
  Synthetic oligonucleotide
caagcuuggcucuggccuguccuaa

SEQ ID NO: 169 - DNA, 25 bp, Artificial sequence
  Synthetic oligonucleotide
cagcggtaatgagttcttccaactg

SEQ ID NO: 170 - DNA, 26 bp, Artificial sequence
  Synthetic oligonucleotide
atttctagtttggagatggcagtttc

SEQ ID NO: 171 - DNA, 26 bp, Artificial sequence
  Synthetic oligonucleotide
catcaaggaagatggcatttctagtt

SEQ ID NO: 172 - DNA, 26 bp, Artificial sequence
  Synthetic oligonucleotide
gagcaggtacctccaacatcaaggaa

SEQ ID NO: 173 - DNA, 30 bp, Artificial sequence
  Synthetic oligonucleotide
acatcaaggaagatggcatttctagtttgg

SEQ ID NO: 174 - DNA, 30 bp, Artificial sequence
  Synthetic oligonucleotide
ctccaacatcaaggaagatggcatttctag

SEQ ID NO: 175 - DNA, 20 bp, Artificial sequence
  Synthetic oligonucleotide
tcaaggaagatggcatttct

SEQ ID NO: 176 - DNA, 25 bp, Artificial sequence
  Synthetic oligonucleotide
acatcaaggaagatggcatttctag

SEQ ID NO: 177 - DNA, 25 bp, Artificial sequence
  Synthetic oligonucleotide
cagagctcagatcttctaacttcct

SEQ ID NO: 178 - DNA, 25 bp, Artificial sequence
  Synthetic oligonucleotide
cttacaggctccaatagtggtcagt

SEQ ID NO: 179 - DNA, 25 bp, Artificial sequence
  Synthetic oligonucleotide
atgggatccagtatacttacaggct

SEQ ID NO: 180 - DNA, 25 bp, Artificial sequence
  Synthetic oligonucleotide
agagaatgggatccagtatacttac

SEQ ID NO: 181 - DNA, 29 bp, Artificial sequence
  Synthetic oligonucleotide
ccactcagagctcagatcttctaacttcc

SEQ ID NO: 182 - DNA, 25 bp, Artificial sequence
  Synthetic oligonucleotide
gggatccagtatacttacaggctcc

SEQ ID NO: 183 - DNA, 27 bp, Artificial sequence
  Synthetic oligonucleotide
cttccactcagagctcagatcttctaa

SEQ ID NO: 184 - DNA, 25 bp, Artificial sequence
  Synthetic oligonucleotide
tacttcatcccactgattctgaatt

SEQ ID NO: 185 - DNA, 25 bp, Artificial sequence
  Synthetic oligonucleotide
ctgaaggtgttcttgtacttcatcc

SEQ ID NO: 186 - DNA, 25 bp, Artificial sequence
  Synthetic oligonucleotide
ctgttgcctccggttctgaaggtgt

SEQ ID NO: 187 - DNA, 31 bp, Artificial sequence
  Synthetic oligonucleotide
cattcaactgttgcctccggttctgaaggtg

SEQ ID NO: 188 - DNA, 18 bp, Artificial sequence
  Synthetic oligonucleotide
ctgttgcctccggttctg

SEQ ID NO: 189 - DNA, 22 bp, Artificial sequence
  Synthetic oligonucleotide
attctttcaactagaataaaag

SEQ ID NO: 190 - DNA, 25 bp, Artificial sequence
  Synthetic oligonucleotide
gatctgtcaaatcgcctgcaggtaa

SEQ ID NO: 191 - DNA, 25 bp, Artificial sequence
  Synthetic oligonucleotide
ataatgaaaacgccgccatttctca

SEQ ID NO: 192 - DNA, 25 bp, Artificial sequence
  Synthetic oligonucleotide
aaactgttcagcttctgttagccac

SEQ ID NO: 193 - DNA, 25 bp, Artificial sequence
  Synthetic oligonucleotide
ttgtgtctttctgagaaactgttca

SEQ ID NO: 194 - DNA, 25 bp, Artificial sequence
  Synthetic oligonucleotide
ccaattctcaggaatttgtgtcttt

SEQ ID NO: 195 - DNA, 24 bp, Artificial sequence
  Synthetic oligonucleotide
tgttcagcttctgttagccactga

SEQ ID NO: 196 - DNA, 20 bp, Artificial sequence
  Synthetic oligonucleotide
tttgtgtctttctgagaaac

SEQ ID NO: 197 - DNA, 19 bp, Artificial sequence
  Synthetic oligonucleotide
cgccgccatttctcaacag

SEQ ID NO: 198 - DNA, 20 bp, Artificial sequence
  Synthetic oligonucleotide
atctgtcaaatcgcctgcag

SEQ ID NO: 199 - DNA, 25 bp, Artificial sequence
  Synthetic oligonucleotide
gccatcctggagttcctgtaagata

SEQ ID NO: 200 - DNA, 25 bp, Artificial sequence
  Synthetic oligonucleotide
ccaatgccatcctggagttcctgta

SEQ ID NO: 201 - DNA, 25 bp, Artificial sequence
  Synthetic oligonucleotide
ctgacaacagtttgccgctgcccaa

SEQ ID NO: 202 - DNA, 25 bp, Artificial sequence
  Synthetic oligonucleotide
tttgaggattgctgaattatttctt

SEQ ID NO: 203 - DNA, 25 bp, Artificial sequence
  Synthetic oligonucleotide
gacagctgtttgcagacctcctgcc

SEQ ID NO: 204 - DNA, 20 bp, Artificial sequence
  Synthetic oligonucleotide
tgtttttgaggattgctgaa

SEQ ID NO: 205 - DNA, 19 bp, Artificial sequence
  Synthetic oligonucleotide
gctgaattatttcttcccc

SEQ ID NO: 206 - DNA, 17 bp, Artificial sequence
  Synthetic oligonucleotide
gcccaatgccatcctgg

SEQ ID NO: 207 - DNA, 26 bp, Artificial sequence
  Synthetic oligonucleotide
ccaatgccatcctggagttcctgtaa

SEQ ID NO: 208 - DNA, 18 bp, Artificial sequence
  Synthetic oligonucleotide
tcactttcataatgctgg

SEQ ID NO: 209 - DNA, 20 bp, Artificial sequence
  Synthetic oligonucleotide
attcactttcataatgctgg

SEQ ID NO: 210 - DNA, 18 bp, Artificial sequence
  Synthetic oligonucleotide
cactttcataatgctggc

SEQ ID NO: 211 - DNA, 20 bp, Artificial sequence
  Synthetic oligonucleotide
ggccaaacctcggcttacct

SEQ ID NO: 212 - DNA, 16 bp, Artificial sequence
  Synthetic oligonucleotide
gcattctaatagcagc

SEQ ID NO: 213 - DNA, 19 bp, Artificial sequence
  Synthetic oligonucleotide
tcagcattctaatagcagc

SEQ ID NO: 214 - DNA, 16 bp, Artificial sequence
  Synthetic oligonucleotide
aggatatggaaccaaa

SEQ ID NO: 215 - DNA, 19 bp, Artificial sequence
  Synthetic oligonucleotide
tcaaggatatggaaccaaa

SEQ ID NO: 216 - DNA, 16 bp, Artificial sequence
  Synthetic oligonucleotide
acaataaataccgagg

SEQ ID NO: 217 - DNA, 19 bp, Artificial sequence
  Synthetic oligonucleotide
tcaacaataaataccgagg

SEQ ID NO: 218 - DNA, 262 bp, Artificial sequence
  Synthetic oligonucleotide
aaaacactaacacatcataatggaaagttactttggttgtaaaatatgaattatatttaaagttgcttcctaacttttatttttttattttgcattttagatgaaagagaagatgttcaaaagaaaacattcacaaaatgggtaaatgcacaattttctaaggtaagaatggtttgttactttacttttaagatctaagttgtgaaattttcaaaatggactatgtacctgtgtatcttaaaaatccgttttatttctctca

SEQ ID NO: 219 - DNA, 382 bp, Artificial sequence
  Synthetic oligonucleotide
ttaatctatcgtcttcctttaactttgatttgttcattatccttttagagtctcaaatatagaaaccaaaaattgatgtgtagtgttaatgtgcttacagatgttgataccacctatccagataagaagtccatcttaatgtacatcacatcactcttccaagttttgcctcaacaagtgagcattgaagccatccaggaagtggaaatgttgccaaggccacctaaagtgactaaagaagaacattttcagttacatcatcaaatgcactattctcaacaggtaaagtgtgtaaaggacagctactattcaagatgttttctgttttatatgcatttttaggtattacgtgcacatatatatataacttatatgtatatac

SEQ ID NO: 220 - DNA, 373 bp, Artificial sequence
  Synthetic oligonucleotide
accatttgctacctttgggatttgtatatatatatatatttttctctttctatagacagctaattcatttttttactgttttaaaatttttatattacagaatataaaagatagtctacaacaaagctcaggtcggattgacattattcatagcaagaagacagcagcattgcaaagtgcaacgcctgtggaaagggtgaagctacaggaagctctctcccagcttgatttccaatgggaaaaagttaacaaaatgtacaaggaccgacaagggtaggtaacacatatatttttcttgatacttgcagaaatgatttgttttcagggaactgtagaatttatttcagtaccctccatggaaaaaagacaggga

SEQ ID NO: 221 - DNA, 348 bp, Artificial sequence
  Synthetic oligonucleotide
gatatctttgtcagtataaccaaaaaatatacgctatatctctataatctgttttacataatccatctatttttcttgatccatatgcttttacctgcaggcgatttgacagatctgttgagaaatggcggcgttttcattatgatataaagatatttaatcagtggctaacagaagctgaacagtttctcagaaagacacaaattcctgagaattgggaacatgctaaatacaaatggtatcttaaggtaagtctttgatttgttttttcgaaattgtatttatcttcagcacatctggactctttaacttcttaaagatcaggttctgaagggtgatggaaattac

SEQ ID NO: 222 - DNA, 376 bp, Artificial sequence
  Synthetic oligonucleotide
tttgccagtacaactgcatgtggtagcacactgtttaatcttttctcaaataaaaagacatggggcttcatttttgttttgcctttttggtatcttacaggaactccaggatggcattgggcagcggcaaactgttgtcagaacattgaatgcaactggggaagaaataattcagcaatcctcaaaaacagatgccagtattctacaggaaaaattgggaagcctgaatctgcggtggcaggaggtctgcaaacagctgtcagacagaaaaaagaggtagggcgacagatctaataggaatgaaaacattttagcagactttttaagctttctttagaagaatatttcatgagagattataagcagggtgaaaggc

SEQ ID NO: 223 - DNA, 348 bp, Artificial sequence
  Synthetic oligonucleotide
ttatttttaaattgccatgtttgtgtcccagtttgcattaacaaatagtttgagaactatgttggaaaaaaaaataacaattttattcttctttctccaggctagaagaacaaaagaatatcttgtcagaatttcaaagagatttaaatgaatttgttttatggttggaggaagcagataacattgctagtatcccacttgaacctggaaaagagcagcaactaaaagaaaagcttgagcaagtcaaggtaattttattttctcaaatcccccagggcctgcttgcataaagaagtatatgaatctattttttaattcaatcattggttttctgcccattaggttatt

SEQ ID NO: 224 - DNA, 309 bp, Artificial sequence
  Synthetic oligonucleotide
atagaaatccaataatatattcaccaaatggattaagatgttcatgaattatcttcaaagtgttaatcgaataagtaatgtgtatgcttttctgttaaagaggaagttagaagatctgagctctgagtggaaggcggtaaaccgtttacttcaagagctgagggcaaagcagcctgacctagctcctggactgaccactattggagcctgtaagtatactggatcccattctctttggctctagctatttgttcaaaagtgcaactatgaagtgatgactgggtgagagagaaaatttgtttcaattct

SEQ ID NO: 225 - DNA, 433 bp, Artificial sequence
  Synthetic oligonucleotide
taaatttgacttattgttattgaaattggctctttagcttgtgtttctaatttttctttttcttcttttttcctttttgcaaaaacccaaaatattttagctcctactcagactgttactctggtgacacaacctgtggttactaaggaaactgccatctccaaactagaaatgccatcttccttgatgttggaggtacctgctctggcagatttcaaccgggcttggacagaacttaccgactggctttctctgcttgatcaagttataaaatcacagagggtgatggtgggtgaccttgaggatatcaacgagatgatcatcaagcagaaggtatgagaaaaaatgataaaagttggcagaagtttttctttaaaatgaagattttccaccaatcactttactctcctagaccatttcccaccagttctta

SEQ ID NO: 226 - DNA, 318 bp, Artificial sequence
  Synthetic oligonucleotide
gtgttttggctggtctcacaattgtactttactttgtattatgtaaaaggaatacacaacgctgaagaaccctgatactaagggatatttgttcttacaggcaacaatgcaggatttggaacagaggcgtccccagttggaagaactcattaccgctgcccaaaatttgaaaaacaagaccagcaatcaagaggctagaacaatcattacggatcgaagtaagttttttaacaagcatgggacacacaaagcaagatgcatgacaagtttcaataaaaacttaagttcatatatccccctcacatttataaaaataat

SEQ ID NO: 227 - DNA, 412 bp, Artificial sequence
  Synthetic oligonucleotide
taagcaacataaatgtgagataacgtttggaagttacatttaaaatgtctcctccagactagcatttactactatatatttatttttccttttattctagttgaaagaattcagaatcagtgggatgaagtacaagaacaccttcagaaccggaggcaacagttgaatgaaatgttaaaggattcaacacaatggctggaagctaaggaagaagctgagcaggtcttaggacaggccagagccaagcttgagtcatggaaggagggtccctatacagtagatgcaatccaaaagaaaatcacagaaaccaaggttagtatcaaagatacctttttaaaataaaatactggttacatttgataaaattataccatagattgtaatttaatgatgtttaatgtaaagttattaa

SEQ ID NO: 228 - DNA, 2226000 bp, Homo sapiens
aaacaagttgtactacggcaaaccataaaccttctgtacagcataggaaacaattaacagagtgaagagacaactgtggaatgggagaatatattagcaaaccatatgaccaatatgcagctttcatccaaaatatatgaggaactcagagctcaagcaaaacacacaaacaaaaaacaaaaaatctgattaaaaatggtcaaagcccctgaatagacagttctccaaagaagacatgcaaatggccaacaggtatatgaaaagattctcaaaagcgctaatcatcaaggaaatgcaaattaaagcaacagtgaaatatcacctcaaacttgttaggatggctattatcaaaaagataaaaaaaataacaagttttggcaagaatgtggataaaagggaatccttatacattgttggcgggaatgtaaatttgtatagccattatggaaaacagtatggagattcctcaaaaagttaaaatacgaatgccctaggatcaaattaccactcttttgggtatatataaaaaggaaatgaaatcagtatctagatgagatatctgcactcccatgttcagtgcagagttattcacaatagccaaggcatgaaaacaacctgagtgtacatcaacagataaattaataaagaaattgtgatatatgtaaatataatgaaataatatttagcctacaaaggaaggaaatcctgctatttgtgataatgtgggtgaacctgaagaacattacgctaagtgaaataagccaggcataggaagaataatactgcatgatctcacttacatgtaaaatctgaacagtcagctataaagaagcagagggtagattgattgttaccaagggcagagggagggggagaatgggaagatattggtcaaaggacacagagttttcattatcaggatgaataagttctagagatctaatgtgcaggataggggctatagttaataacactacagtatgcactaagagagtaatcttgagtgttatcaccaaatacacaaaaaaagggtaaccatgtaagaggatggatatgttaattacttttactgtagtaatcatttcactatatgtatattgaaacatgttgtacaacttgtatacatttttacaaaaaattaattttcacaagcctcaagacagacttatgaatagatgaaacagaatacggaaaatatctgaaacaggaaggagtccagcattttagaagaaaaaatagaagtccattgtggctggaataaagtataaagaggaagagaggcaagagtttaagctggagaggctagtagaagccaagaatacaacaaaaaaaacacatggcatttatgctattctcaatctctaaaatagatatgctaatcaccgaagactttttatgtaaaatagcagtaattgatataccagtattttcagagttgtgtggaatgatatgtatattattttagagaaatcttggtggattcatatggactcaacttatctttcaggtttatttcttgcatttataaattatatctaataaactataagttactgattgttgtgtatatcttgatatatagggattatttgtgtttgttatacaaaaatcaaatggaagtagaatagctaaaatgtatgagtacttgcacacaaagcacacacacacacacacacacacacacacaccataaccccttaggaaaacactatttcagaatagcgatattggcatatttcacatatgctaaatgagttattccttatagtttcataatgtaactatgaaaccagctgtctgtttactttttgtggtaggggggatagctttcctaacaaactaaatacctaatacaaatctgagaggaaacatatgattttattaatttttctcatgaaaacacttaaactttcttgtgttataatttcaaaccataagtgcccccaagacaggcaaacttggaagttttagagaaaattatacggtataattgataacaattacagtttcttttaacaaatactgattcacgattagtatttttaaaatacaaaatgcattttcctgaatagcatttatttacttgttaaagaagttgtgtaagagattcagctaatctaatttcttactttgtgaagaaatcactcatctaaagtcaaaatatcaagtataaagtctacccttgggagaagcatacagggtgccagactttaaatatctccagtgtgcaaaataaataatattttcttgaaatatcctcttatttgaaaatttgctatagagtcacaagaggcaaattccatttgagaaagtgcatgctatattttacaacgcagaaatgtggagctgagcacacaacatcttattgcaaaagtacaattcagaagagagtttttacccttaaaaggctgtgaagataagtaaaaatcagccaaaatttcagtgtgaataatatgatgtttggcgaggaactctactattgttacacttaggaaaataatctaatccaaaggctttgcatctgtacagaagagcgagtagatactgaaagagatttgcagatccactgttttttaggcaggaagaatgctcgttaaatgcaaacgctgctctggctcatgtgtttgctccgaggtataggttttgttcgactgacgtatcagatagtcagagtggttaccacaccgacgttgtagcagctgcataataaatgactgaaagaatcatgttaggcatgcccacctaacctaacttgaatcatgcgaaaggggagctgttggaattcaaatagactttctggttcccagcagtcggcagtaatagaatgctttcaggaagatgacagaatcaggagaaagatgctgttttgcactatcttgatttgttacagcagccaacttattggcatgatggagtgacaggaaaaacagctggcatggaaggtaggattattaaagctattacatcattacaaatacaattagaagctggccatgacaaagcatatgtttgaacaagcagctgttggtagctggggtttgttgccgagctcttcaaactctgcaaacagtgttgcttttacagaatggattttaaaattgccttgtgctgcgttagattttggggagggggtgtgcttgcctccaacctcaggaaaacacttctgggatagaaatcagtgttagaagattttagaataaagtattgttcaggagtctaggtttcttcaggtagatgatgacagggggaaaaaaatcttcggggaaatctaccccagattagttatatgcaatttagttgcaagaactgattgatgtattggcatattcagacagtgagagaaatgagaatgtacagaatgtttggataggttgaaaattgttatacttggtttctattttataaggagtttggctgtcagtcatttctcctcatcaatttctagcttttgacatttattcagtcattctgcattatatgaagaaaatatatcaatatctcctgcagggtttttcaacaactctagcatctgtttcagctattgaactgtattcacgttttgccaagttgatgtcgacccagctggtctatgatttctcgcttgattactgctcttaatttctctgtatcagcttgtttcagatagggctttgaaggctgttaatgaaaaatgacagaagtgataaattattgaaaatgtgagcatttatttatttatttatttatttatttatttattttgccctttaatgagttttgtcttacattctttcttgcctgcgtacgatttttagaaccctttctctgttttgcaatatttctttcccctacaatcagtggattataattataagtacttttaagcaaatggagcatgagcatggacagtatttggctccaaaaataaagtttttggagaaaggggagcaatttatgctttttgtataaactatgcatcgtttctataacctatcttcacatgctgtcatggggatctgtcagtgactgtaatcagactgaacatattgaaataatctttatcaccactagggtaacaagcaaataaaacattcaaacatttaacaagtgattgtttaaaacagatgttaaataatatagaaatagattttcctaagtgtgaaaagcctgattattaactgtctatgtaatacagaatctttcggctctctacccagtctcctccatagcctgaggagctaaatcatccaagttaatagactatcatatatgtacatctaatatgacctttcagtgtacacagtgctactcgtatgtgctgtgccttttctgtagtaattgtaatatcccagtcagtctggttaaggaacactattggctgttatgtaactttttttctgaatgttagtccatggttttcaattacgtattcctcttagaaagggtgagttaaaaacaacatgtatttaaatatcagtaaattaattagcaagtggtgggctaattacactaggatttctccaaaataattgctaacttctgttttgaaaaatagtcaaggatttggatgactactttttaaccttgaagcatacattaccgtggttgaatatcattcataattcatatatacagcaggaaagaaaatagttttctagatgtatcattttagcagcaaagaatttttttttataatgtggttcaggcactctgattatttccgtttaatacttttaagtactgtagatgcttttgtatagtgtgttacagaacttggttaatctttgggaagctcaaagactgacagaattttgcatccaaatgctacagggttattttgtggttggttgagaaaattcagctctgtctatactgttgtttaaaatacagccctctttggccaatgttacttttcaactttttataaccgttttaagtgaccattcaagactgtaaaaactcttttacactgcatctttagtaggactctccttttgtgaattgtctccttcgaaaaaatgtgagcttccttctagcctcactctcttgttaccatagttacttttaaaagaaggtttttctttttcaatgaagatagcgtactttaaatcagccactggaatccccaaactgtgtttttgtattttttagtttatagtttaggcttgcttcatttgcggttagaaagtgctctgtatttggtcccactgatgaatggattggacagacgctaggtggcaccagctgttgattattaatgaaatcgtaaagtctatatgccacgcacctgaagagcaggcaaacccttattgataaatgcattgtaagagctggaaatgtctgccaatatttcttgctctaaaacagggtcagcctgcagagtgatgagaccacgtgaagtcttcaaatcccaattgcttaatcctgtgtcttctgaagtgctttaaggaagaaaaaacgatgaaggagaaatgcataaaaatagaaggtgtgaaagagaagtgggacacaatgaaatagactgcaaacattttaatatatttttaaatccagaattagtgacttttataaatctatgtgagttttccccaattctctcaaactcagattgttttctctaaggcatttatattctaaaacaattatttatctcttttaggtaaaaattttattgagcatcattattttttaagtaaaaaaatctcccttatttctctttttgtgataagactgtcaagtgaaatttcccacatgagctagagtagctgcctctcaggtgttgctcttcagaaagatgagcaggggaagacactatcggttaagaaatatgctttgaaatgttttgcctgagaagcttgctccatcctattatcctcccattctcatataatccatcttttaagaaggaaaaagcaaataaaaacaaaccacttaagcatgtgcatacacacacacacacacacacacacgctttggaaaaaaaaaaaagtcagaactgtttaaaaagagaaagccacgacaatattttagttggtcctggagttaataaactaaagtgaaaaataggaaggaaagtccataattagattgtggagagtaaataattacttaaaactggaaatatttttccagaaaaatatgcaatattttttcttcactgggagtaactgacaattcctgaagaaggtgagatggtttagaaagagtgcaaagataatatatgctgtgattctccaatgttatctgaaaagtatgtaatatggctagttatcttgattatagcatggactttggtaaagatttttatgatgcccatatggtgaaaatggagaaatatttgctgtttgacataagagtctggtcaataaatcagctggctaaatgaccctgcctgtgatgtatcaattaatgaatcacagtaaaccaggaagagggcctttcacaggactatagcatagttctataaaattggttccatctgacttgaacctaatcttctgtaatgtgccttatgtctctgttcttgaacctacttggcctgtgaaatattaatgtccaaaaactgaaggacgatccagatagcctgtctatctgggaagcagaacaaatacattgaactattagggtaccaaaggattatgaccacctaaaaactgtggtgaggtcaaagagaataattgtaataggaataagtataacatcctaagctaaggttcataaaatcaatctggcaagtacaggacatgagagagttaaagcttagtaataattaattgaataaatcttactgattttgttggtcatcattattatcagtcataattcatatgacatcaaaatacaatgaaacaaagtaatattgttagacatgtatcctgaaaaaggaaatgaaaaaaatgagaacgaattttagaaggatatatatgatataatggtgtgtgtgtgtatatatatgataggtatggtatatgtatatattatatgtggtaatatatacatattttagaaggacaccatgatctaagaggaaccttaacatttgggggtatgttcagtgaaaagtgtctgaatgctaaaaggtcctacaaactataacatttgaggggcatggaaagtactagaaaagtgaaaagttgaagaatacttgaaggaaaaaagtagagaaaattaagctgatttcaaatattcgatgtgctataatgcagaagagggtttagactcacttgcacctctttggtagcaatggaaaagtattcttccagttaatgttgtgagcagagaattgattactttgtgagacactgcactccttattcctaaagtgttcagtgctaagaatggagtttctgcactaaatggaaattgaagaagatgtctgagataatttttaactaagaatctgtgagtccaatcatttcttttaaaaacatgttcttttttttagacatttatttctctgagggtctctactactccactcgcatcatccaggctaggggtcagtaaatgatagtccacattgtcacatctattactgtttgaccagtcatttaaaatggttttcacgtttctgaattgtttcatttcaagaatatttctgacacatgagattatataaaatttcaatttaagagtctatagtttatttggaagacagccacacccatttatttgtttatatgctatataggactcctttcatgctaaaacacagttgagtacttatgacagagaccatgtgggccacaaagcaggaatatttactatctggccctcgataggaaaagtttgctcacctcatctctagactataaagaaattttgttttttgcttattgactcaagtatctaaacaagcaatgtaacagttaaataacagttctataccataaacagaaattgtaaccacccatactacttaagtactagagacttggaaaagtagttcaaatatgcagcctaacagataaagatggtttcatttggctgttagtctattgagataatttacttgttgaggaatgtttatttaatgtttccataaaaaattgaagtctctgcaatcattgacttatatataatatctgcctagtttgactccattaatcttgctgaatttacctatttggtaggattctgttatttttattgctgcttttccgttagtgtatgatttcagtagacttacagaaagggtgaaagtcaatggaaaacaaggtaaagtgagtggaattttcttcttgcagctaccctcttctctcttcgtgggtttatagactctctcagcagctttggaattgcagttttagagacttacttttataacattatgagtgtgttcttgatcaaatatgttctagaagggatcaagataaaacaaatgcactgcactataaaagaacagttaagggttttagtaaatgattgataagacatgctaaatttaagaattagcaatgagttatttatattttcctgaacatagggatatgagaagggattttttttcatgtcataggagaaactataatcaaattctaagcataaagctgagggattctgaatttaccaccaaatattacaatctccatagttccataatgtgcaactaaaatccccacattttttttctagggaaagatataatttctgctcactggtagcgctggaaattcctgtaaaacccataggattcttattgtatttccatgaggatgttcctgagcagctactttgtgatgcctgtctctatggtaacagacacaaggcttaagggtctgaaagaaattcttcctgttggcttaggaatatggagcaatgagggagacccactgaagactataaaactgaggaaaggcaaaagaggcaattgagaaaaagttgtcgtgggggagctttttttgtgtatttgaaaataatttcacaatttcatttgctcttaatatatctctgaatgaaataagaaccaacatacaagtaaagttttacagaaagaaaaaattctgtgaaagtattgttttttaaccatctagtcaattttatgtaattgaagtcacacagattttttctttagttggcttgcctttcgctactcaagaaaagattgcttcttgcctgaaattggtaagaggacggctctacccctggcaaatttagttcttgttactgctatcaaagatcttgatcttttaaaggactttctttttcctgattccaagggtaagaatattgaactctggttcacattactcataatcactgagcttctcagggaattatgaaagtacactagccttccaagatgttcttttttaggtctatttctcttaaagaccagtaataaatagagcaaatagtactgcttatttgaaaattgggtatttcgtaagaggatgctgggtgagagtttgtgtttttacatgttttactttgtttctcttattaaaataacaaaaaagcaaacaaaaagctcctagaagtttaaaaatatttgattttccatttatttgacttcatcttactttcagcttagcaaatagggacacatcacatttgaattgttttagaaaggagataaatatgactctcctttcccttagattcaaagtatatgttcaaggtgtcatcaaatagccaaaagtctttaaaatatttatgctatgtaaatgtccttcaggaaaatataagtcagagggaggagatggccgtcttagtataaagctctcatgtgtatttgcagtgttaacatgagtgttgatgttttatttatcttcttaacatgttatatctgcacatgtcttcatttgttatatgttagggtcaacagaaaaaataataaagttattgcaagtaagcaaaaacttataacctgatcaataaaaattaatattttaggttggaagataaacacatctcaaatgtcattttataagatcaagttaacaaatgttagcatgcttaaagctttagaggaattaaatctttttatggtttattttctgaccttgagaaatttatagactctgtgcagatatatgttttcacaaatttaatccactctatatagatattagtaaaatgtaagacagtgtcttcagtacctgttcacactatctttaaattaaatgaaaaaactcaagttagctgtaatgtttcagtgtctcctttgatagtgttggaaagcaaattttttaaagaaaaccttttttataactccatacattttgacctatagatactaattgcaatataaaatgtgacatctgaataaaacaagaatactttaaatattcaatatatatactacttttgaaaagatgacttaaattataaacatataaattatatgcctaacatgactggcttccaaaaaacttattttcttgagctttggggttacagcctaaagtgcactgcagtaaataagcaaatgggtaaaaatattgtctagacaaaagtaaaactgagatgttcttttgagcaaacgtttatagaggaggtacaggatgacaactggaaacgtaggtggtacgcagagattaattgctgtcaatgtacacctgaaggtaaatggatggtgcttatcaaatttccagaagaaatattgacattatgttgcaatttgaagacagggttatgaatacaaagagctaagggaaaataaacttatcagcatcattcagctctggtcatgacattgttacaactgattataacactcccaggataaaatgtgataaggaccatcatagtctgtttttactagtacagatttcttttatacatgctataagtagaattgttcggtccagcaacaataagctggattattgaaagtgacactaatgctaacctgaaattgtatgggttttaggggagatgtgggactcatttatgttctatgacaagtgtaaaaaggagattaagtaaaagcctgcatgtgatggacacattagtgagtaggaatctcaggttcctctccctttggctgctgacccattcatgggctggttttggtggccacagtggcaggaaacagagtctatttctccattaggtcatccagacaggattagagcccaccaactgaaatgaaaggttgtttctgctgcttttcattcatccaacaaatatttattgataaattctaactgccaggctctgtgctagagcaagatgactaagatacagtccctgaggaatttagagacgaacgtggtttatgtggatgagaagagaaaaatatttacagtgaatagctaagcagagagcaacagcaactgtgaacccagacagtaaagctgacttaggactgagctagaggtttccggagttcctagtgtgagtgatgtggaaaaactggcaagtccatcaaagagcaaaatgataactgaacagaaagaaagcaaatccagtgaaaaatagtaattcaaagtaaagggtaaagcgacatatttgaagtgtcacttgaaataaaaaggagcatgccttccacctgttgctcatcttcactggaatcaaacctagaaggaaaatgtctaggctggtctaaaagccagttgcatacaatgatattaaatatgattaaagctagcatgagcatgaccatgcaaactttcaggaggatttgaaaacagttacctcccattggtagtttatgtacgtctatccctggaaactttttcctatgctatctttagagaccttgtcatattttatctcaatgtctaacactctttaattagaagctacctgaaaatgtttcactcatgtataaagttaaattaatcacagaatcagacctcagaggttacaaaggagggctgaaaggataacatctcagatagaatagatctattgccaaataaacctgtaacaataagaaattgtgttagataatccgtaaggttttatccaatttcaacatcttccaatttaattgatctccagcctcacacccaactcctcctaggaaattaaaaagagacaggtaaacaagatattttctgaagaatcgaatcatccagaaagtcattctctctcaagcagtacattttctaaagaatttaattatcgaaaaaagtctctctctctcctctttctctctcccttcttctgacatatatagatatgcatatatacacatatatgtatatatttatctatatatctatttatatctctgactcgctgaagtaacttagatatataggctaaaggcaaagaaaaattcctcccaacattcattagtaatttccctttatagattaaggaaagtatttctgtcctccttgatttttaaaacattttactgaactataacacgaatatataaaagttcacaaatcaataggtgtccagcttcatgaattttcacagattgggcacaccccagtaattactcaaggcaagaaaagaatattaccagcatccaaaaactttgtcttaccacttcctagtcaatactctcccagaggtaagtggaatactgacatctaacacaccattgattaggacagacagttcctgaaatgtatgtacttgaagccatacagctgtactcttttgtttctggctcctaaatctcaacattctgtttgtgagatctatctaatttgtttcttgtagttgtggtcccataattttcagtgttgtgtagtatgccatcatataaatgtcctataatttacttattccatctactctggatgaacatttaaattgattccatttgtgaactcttaaaaataattccactttgaatattcttgcaaatttactgcacatatgcatgtagttctgttatgtgccaagaagtagaattattaggtcatagaatagtgaaatactcatctttagttgaaaatgccacgtagtttttcaaggtaggtaaacaaagaaccatcattactttatagaagttctggacatgtcaatgcttagcattattagtctttaatttcagcctttctggctgttatactatagtatctcattgtgtttctcatttccatttttttctagtgactaattaatttgagaaccattttttgtgtttattgctcatgtggatgttatctatagtaaggataacatttcctcccaactttcattagtaatttccctttgtagattaaagaaagtaattctatcaacttgatttttaaaatgttttactgaactataacacaaatatataaaagtgcacttttctaatctcatgctcatttttctattgatttacaattttggtttttataggtatgagatctttacatttttatatggtccctacatttattgtatgtgttgcaaacatctagacagatatcttttataggaacttagaatttcaaaacccggagaccattaaagaatatttagtcccatatcttagtttgaaagatgaggaaagtgtgacttatagagaaattgtcatttcttttaagtttcttccagttagtagtaaggccagatacgtaataaaagtctcctgacactgaagtaaagggtttttttctagtaaaccatgtagggtctttagtcttgtctaatactgtgactcaaactccttgtctcttttggaaggccacaaaatgcgtgacatagtaattttaatagcaagtatagagtgatgcgtgattaatctcattgattttgtgaacaaaaatatcttcagctaacaaactgttgtatagcatggccatgcaatatttaaacctgtatgggccgggcgtggtggctcatgcctgtaatcccagcattttgggaggtcgaggtgggtgtatcatgaggtcaggagttcgagaccagcctggccaatatggtgaaaccccatctctactaaaaacacaaaaattaggtgggctcacgtgcctgtagtcccagctactcgggaggctgaggcagaagaatcgcttgaacccaggaggctgaggttgcaatgagtcaagatcgtgccagtgcactccaacctgggtgacagagtgagattctgtctcaaaaaacaaaggaaaacaaaacaaaacaaaaaaaacctatatgttcttttcggcatcagattttatttttcctctttcataactttattattatattcagtttcttttcacatttattcttattacttggatgttcccattccaaatttggttctaattcaaaaagttttcattttctatagtggatgaagaacaacataaattttacaatactttcttttagtgagataaaatttagtttacaaaacataattactagtacattaatatttactatttatttttaacatgctaggtgcagttcatgcgttattttagctaatctttggaacaacccccgccaaaatgttttattatgcctagtttatagatctagaagctgagcctaagtgagattaagctacttgtgaaacagctctaatcagaaccagatctttataagattctatgcatttcactccttccatgatctacttctgtacctgcttggaaggaaattgagttagtgatacagatttgggtcactacctgcctttagttcttctgccatacataggtcttagggataacctctttttccaatatcattaaataattcattttctgtatcttttttttccaaaacggtaattagagaagtcacttcgttggccttgattttattcattgtattgaataaatacaattttctaaatacggaactcttattcatgtgcaacctaaatacggattaggtgagttaatatccagagaccagattattactaaacttttcttgcatttagagactgaacttattataagaatcttttaattctttttagcaacctattccaaggttgattacttctcatgcatattttagttccaaatatttctttctctttcttgttcattggagaagcattccacagatgcctgagaaacaacttgctctcagtctctctatcttctagtccttggctagagtccccttgccacacttccctagcttcatgcagagtagatactcaatagtacttccacttagaaatttaaatccagatgagttacctagcatgctactttcctcttaaggagtaagtgaagcaaatgtttatagttgtttcactgtatgtgaacaaataggaatgtcaataaaacaagtacatttaattcataagtacttgataatcttaattccttaaatgtataaagctttaaaattaacaaaatactttcaagtttaatttattcacataggaaccatatgaggtaagcaaggtaggaagtcttatttcctctttatagagagccatgtaactaatttctcctatttgtatcctaaatttcttttagctctgccatcccccctccatatctcctgacagtcaccaccttagtttagatccccatatctgacttcgaatacactgatagcttcctaatgtaccttccttcttgcttctctccagtttacccttcacaaggctgctaggcttatctctctcaaagacaaaacttaataagttattccactgcttaaagtccacaggtggctttatattatttatagattataattcaaataacttgcatgaagagaaggtactttacaacaatttccctgccatgtgctcagtctaatcttatatccaccatgtgaatgcctcaccctagccatacaaacagttctctgactgtaacacacttccttttcatgtgcctttggaaatgttgactccatcccacagtcataaacaattcttattcacatatatttacttggtacatgctttataatcctccaaaatagtgtagctagtgcctcttctttacttttggctgaatcatgcacccctgtgcatagaatcttcctaatacttgtttcaccacttattttgctgtgatgtacttttcaggttattgatttattcataaactattagtgcctgagggccatgaattctctattctttttttttttttaccctttgcttagctcttctggagggagctactcaagtttaacttaaagtagtaatgagttacacagccagtaagacatttgtttgagtcctaaggtgacatcatttccattgcatccttcttccctctaatattactaaccatagtacacgagcagtactattgtcaagattcctcctcattcagtttagggaaatgcgttgacccaagttaccatttttgtctatttcacaccgtaaaagtcgggatatttagttatgatggtatgatagttaccctacatggtattttaaaggctctatttcctttgtgacttacacatgacctccccagaggtcttaatttaatggaatcatcacctaaaataatagaagagtaaattgacagtttcgtttataaggtacatggattcaggcatattggtaaagtaacacaaagcaaaaatgtggttcttcatttgtcttgtttcatcactaatagaaaatgatggagttcaccaatcacccaattgtactgtgcagcatggttattgtaaagtatacctgaaattaaaagcaaatatctacttccattttttccactgaattttcatcagaaaatgagaactacatactgaaggatttggggttggcgaatagcagatgtataatgccagcaatatgaaagcagagcaaatgcgtgattggtttacagcctcaacttcagtagtactctgcaaagtctgccagcacacaggtgccttgaggctgcaaagagcgtaggaattcagtggatgtatcaaatgatatgagatgttaatacctacttccttctaatgcatagctttgtgatattagaaaattaataaagaagtgaacaaattaattactttataatctcctaaatcttctctgtggaaggaaaatctcaaagatgcattaagtatccagcaaattggttttgaaattatccattattaaaaagcacaattctgtgtaacaggaagccacatgccaagagctatgtatatttaatcatttatgtcgatgctttttgtagcaattctgtttattctctattgacattatatacagtcctttttatacatagtggaatttaatgtgctgtgtttaaaagacacatcaagcctgacagaatccaattgtatacattatacttttaatttattagaaaatgaaatgatcatttgtgggcttatattagccaaagcagaggataaattttattatattaagaaaatcaaatactgtgactacatttacaaacattgtaaacatgacacttgttgcataattaataaatgaacatattgacctttaatataaaacggcatgaaaggaaagggaaggtggaagatataaccacaatcagaagtggaaatgaactcaaaatctgtaactgtatattaaagaaacatgtgattcatgattgcttttttgccttttccattttgaggcaatagtgccatgttgatattcatttgtgctgtcaaattaagggaaaacattgacaatctttaatataacaaagatagagaataaatgcaggtcaaaagtgtgtgggagaataagagaattgatcacattttaagaacaattacccatgtcactgcttaacccaacgtaatgatgtcaaccagtaggatggaagccagcatcaggaagaatcattttccaagcagatggatctgctgatatttttaattgattgaaggagcgttccattatttttaatcaaaaactaatttcaaataaaatggaaacttccatgaagtttgcaaaaatctgtatgcattaaggctcagactaatagaactacaatgttgtgatagttaataatccattatttaattataatgattattgttcttaacacattacacatgggagtttgtgggaactaccctacctttcttgcttctcaggtgagacaaatcattctcctagtggtctcaagtggtactgaacctcattttatcactgatgacatgctcatgaaactcacactgtactggtgttcttttctccgtctcactcacttctttgctgtgcttcctgggatcacctccgaaataagttgctggcactcaaataatttgctcagggtctacttctggtaaaaggcaacccaagacaacatgatattttattattaatagttttcctcatttaattttatatataatcatttttttctgacagggaagtatatttgaggaaataatgagggcaattatcaaaatatgcattggtttgggagttagagaaactgtcagaagtgacacaccaattttgctacatcgtgacttggtaacagtcattaccattctgggccttttattctcttctgaaaaaatggaagcattcgattacaaatcattaaagaataaagaagatagaaagtgatagaaaagataacaaatgttgatcacaccatgtgcaattgcttgatagtagtttccaggagtactataacagactgagactgtatctacttggaactcgtgggataaaataccattatttgatgccgtatgtgctcggcatgaatgcagtgggaaggatagaaaatatttcatatatttgccaactgtagaatatactgtaatagatcaagtttcattttaaaaatacacaggacacatttttttaaaaatctcatatgaaagcccagcaaagaaaagaagaattgaaggtgtagacatcttgaatgaaaacaagaggacgatttgattcaactgccatttattccaactttcaccctataaccccatagacacagctgtagaaaactgagatcttgaagaaagccactgaattagataatatctacgactacttccaactacaaatgtagaaataattgtctttacctactcatcctcagctagaaagcagctaatgggctactttaaatgtgtgatgctttcacaaattaagcaagactgagtacaacaagcacaacaagtccaacagcacaagttttcacaaacagtattggatgtaacaatacatccaaccagtattagatgtaacaaaaattggttaatttcctaatcaattaattaggaaattttattttctaacctgttggttgccagttatgggcttaagatggaagccagcatcaataggtttaaataatacctttgttttaaaaagaagaagtctaattcatagtcaaacatgtgctttggctaagtggctttgttctgggttttgcatgacagctggtgataaattgggaaaatgtgtaagtagcactgtggtaaggataatgttgatgaagatagaatgtttgaggccactttcagggagaataaaaacgacataaagtaatacttaagactgaattttcttagagatgataatctcatcaccaagcctcattttgccattgaaaaatttcttatgaattcaactatcatatttacatcacaatagacagtattataactctttagcatagggattttgctttaacttactttcaaccaatttatatgttaaagctatttatatctctgctgtttcatgaataaagcccagaggtatcttctttcttgactcactgtcatatcttcacatttcatcacatttttgcagttcaaatatcattcacttagtaacactgaaagcatagaaagattaatcagaaatgatttctgccctcaacaagctgacactggttagagtacaaaagccacactgaaagaatatatggagatctatgatctatgatcaatgatctttgaagttactattgtcatttttgggggcaacatgagtcatgcccatatgaaataacaaacttaatcaatgttgtgtgtgttctgagtgctctaccaaccggccacccccacccccccacatctgtctccctctccttggacctttctattctgagacaaaccaatattgaaatgaagccagttaacaaccccacagtggtctctaagtgttcaagtgaaaggaagagtctcacatgtctcatcttaaatgaaaagctagagatgattatgtttagtgaggagggcatgtcaaaagctgagttaggctgaaatctaggcgtcttgcaccagacagttagtcaaggtgtgaatgcaaaggaaaaattattgaaggaaattaaaagtgttacccccatgcacacatgaatgaaaagaaagcaaagcagtcttactgctgatatggataaaatttaaatggtctagacagatcaaaccagccacaatattcccttaaccaagagctaatccagaggaagatcccaactctcttcaattctacgaaggctgagaggtaaggaagctgcagaagaaaagttggaagctagcagaagttggtttatgaagtttaaggaaagaagccacctccaaacataaaagtgcaaggtgaggcagcaagtgcagttggagaagctgcagcaagttatccagaagttctagctaagatcattgataaaagtggttatactaaatgacagattttttatgtagatgaaatagccttctatttgaagaagatgccatctaggattttcatagctagaaaggagaagtcaatgcctggcttcaaagcttcaaaggacagggtgattcttttgctagagtctaatgcagctggtgactttaagttgaagcaatgctcatttaccattctgaaaatcctagggcccttaagaattatgctaaatagacttagcctttgctctataaaagtaacaataaagcctggatgagagcacatctgtttacagcatgatttactgaatattttaagcccggggttgagaccttgtgctcagaaaaatatattttttttttcaaaaatattactgctcattaataatgtagctggtcatccaagagctcatttggagatgtacaaggagactcatgttgttttcatacctgctaatataacatccattctgtagcccatgggtcaaagagtaagttcaacatttatgtctcattatttaagaaatacatttagtaaggttatagctgctgtaaataataaatcttctgatggatatgagcaaaggaaattgaaagccttctgtaaggaattcaccattctagatgccattaataacattcatgattcatcggaggaggtcaaaatatcacatttaacaggagtttagaagaagctgatttcaaccctcatggatgactttaaggagctcaagttgtcactggaagaagtcactggagatatggtgacaatagcaagagaattaaaatgagaagtggagcctgaagatgttgctgaattcctaaaatctcataataaagcgtgaatggatgaggaattgcatctgatggatgagcaaagaaagtgctttcttgagataaaatttacttctggtgaagatgctgagaacattgttgagatgacaacaaaggatttagaatattacacatacttagctgataaagtagtggcagaatttgagaagactgactccaattttgaaagaagttctactgtgagtaaagtgctatcaaacagcagcacatgctacaaagaaatgttttgtgaaagaaagagtcaattgatgcagcaaaattcattgttgtcttattttacaaagttgtcacagtcactcccaccttcagcaaccccaccctgatcaatcagcagccatccacattgaggcaagagcctccactagcaaaaagattacaactcactaaaggctcagatgattgctagcttttttagcaataaattatgtttttgttaaggtatgtacattttttaacataatgctttgcacacttaggctacaaaataatgtaaatataacttttatatacactgggaaaccgaataattcatgtgactcactttattttggtgatctggaactgaacctgcagtatctccaaggtatacctgtacatattcattcaacttttaccctctaacccgcttacttctgtccctgtggctattgctccaacatcatgataaaaacaaaacatcacatagaagtatggcaattgtactaaacgtattgtaccattggcatttggtgtctgtcgtaccatcacaattgagcctcatccttctttgttaacgcttaattcagagaaaattttcattgagattttataaatgagtaatatggctctgattattgccctgtctgactgcttttatctctatacaatattgtgagagttgctaaagagacttctgatgctgccatatatgtaattggatatttttaaattccatacagtcatctaactgacctctcacccactcaccaaaaattacaactcactccatttgcataaagtaaactgtggaaatatatatattttacctttttcaatctaaattattgctcatggagagtctatttcaccacaaacaatgctatatccttaccttaatggagtattacaatgtaattagccatggaaatggaaaaaatgaaagaaactgttatgaacacatcttcccttttaagccaacttgtcagattttgatagaagaaaaactttcaaagtcttcttacgtgagtcaggtcccattttcttatatttgcattctgctagatttacatctgtctatgacgatgatagtaaaggtgataatgatgataaaggttatgcttatgataattcctcataatgggtaactgtaatatcagataatacacgataagatctttaaaagaaagatgacaagtgaatctcataggagttcagagcatggtgaggatggccctgatttttcatttctgtctctctagtgcattttcatacacactcatcatgggggaggagggcactcaactcaattcagtttatgggatttcatcccagatttctaaatacattatacttatgactctgttcattatcccacccctcccttctctgattatggatgtagtgatgctgattatttttatattcttcactatgaaataactatcattcttcatccatttgggcttctataaaaaaaaataaataataaactgggtggcgtaaactaaaaaaataataaactgggtggcgtagaaacaacagagattcattgctcaaagttctggaggctgggaagtccaagatcaagatgaaggcacactctgtgcctgatgacagaccgtttcctagctactagatggtaccttgttgctgtgtccttatatgatgaagaggcgagctggctctctagggtctcttttataagggtactaatcccaaacaagaaggctctgtactcataacctaatcacaacctaaagacctcaccccctaataccaacctcttggggattagctttcaacatttaaattttggaggaacacaaatattcatactatagcaacattgcaagcaaaattagaataatgtattagtactgttgtgtgggatataacatgagcatgttaagaagagaatcactggattttggaatgtggtaaggccaattatctaattctcaggggaaaatactcagtaagactgaggaagtaggccaggcaaggtgactcatgcctgtaaccccagcactttgggaggctgaggcaggtggatcatttgaggtcaggagttcgagaccagcttggccaacatggtgaaaccctgtctctactaagaaatacaaacaaacaaaaaaaaaattttgctgggcatggtggcacactttagggtggctgaggctggagaatcactcgaacctgggaggtgggggttgcagtgagcggaaatggtgtcactgcacttcaccctgggtgacagagcaagactctgtctcgaaaaaaaaaaaaaatacactgagtaattaaatgtgtaaacatcattttaaaaaaacttttaaaactagtttttaaacttttaatactttaaaattttaaatcatctaatcgaacatgtatataaagatcaaaacaaattaattgtttcagtagaacagtggtgcctagagaactttatttctctggacccaattattcttaactcatcaaatcatatatatatctgtttattcatacgccactccatatatacctaagatagatacatagattgaatcatatgaatttgctgatattggtccattttgaccaaaaaatgataagtttttaggattcaaactaatagctctattactgtattgattaagtggagtgataaggtaccagtgcaatatgttatcactccacttaatcagcacagtaagcccaagaaacataaaacataaagaatattttagaaaatgatgatgatgatttcattttatcaaagctatatgctcctttactgaaatcagacaagggaaaatgttcccttctgtagaaactttattaatcccttatgatcttaatactgttaataatggactagactgtaaaggattaggtaactgaggtgttcaatatggatacttgttttatgtttaatcaaatttatctgactctaaataaatttggctgaaactagacagattccttttctattgagacagtgggctctattaagcactatgtctgcataggaaacattacaattaattttgcagtgacaatatgctttttaactaacagactaatggaaggaggactgatgtaaagcataattctcaaaaagaggggggtaaaaccttggtttctactacaattattcattttatagtattgtttgataacacatactttattaaattgtagatgcattgtaagtttttatagtatatgggaatctaaataaaaggagttatttggttgttatgccatatttagcataaatattaccatccatgtatgttgttgacttaaaacactgttattttctaaaatgtaagcatagaaaaagaataaaattcttagttgatattgcagaaatatattgtagtgtttgcagcatgaaaaggttttatatataataatatacacttaataattaatttccaaaggctgcctgtggtcagccttctttgaaagcatggattctggcaaatgagcaatataatctctttaagaccatttaagctcttaatctcttcaaaccagtaccaaagtctgttcattttgttgtaatagttattgtgtattgtttctttttaattgtgtaagtgagattcaacatcacttgtcagataagaaaaaaaaccttcaaaataaacgttaatttttcccattattgctagaaggaacttggcgtttgaaattttagatattcttaaaatttctttttaaaaatttagaattaaaaacacaaaaagaaaaaagaaaaaaatagcatttactattattccccaaaaatgaaatagtaagatattaacaatatatatatgagatatatatcctgaaaattacaaaatgctgataaaagaaatcaagacctaaataatttcagggatatattgcattcatggattggaagactcagcatagtaaagatgtcaattcttcccaaatcgatctatagatttcatgactgaaaacgattaatgtgggaggaattgctctactcaacatgaagaccttagtatatagctacagtaatgaagacaatgtgatattggtggtgagacagaaacatggagcaatgtaataaaatacagaacccagaaatagaaggaaattattatgccaaactgattctttgcaaaggtgtaaaagcaattcaatgaaggaaactatcattttcaacaaatgatgctagggtatttggatacacataggcagagaaataaacttgacctgaacacctcatactttattcaaacattaactcaaaatagatcatggatactaatataaaacctaacgcttatagatttttcatatatgtatgtgtgtgtgtatgtatacctggattatttccatctatgggtatatatgatttattcctgcctttcctttaaacccaatataattgagaattagtgcaggggtttttcatctttcctagttcaattttacattaataatctttatccctttaaagatattgatattgaattgttggagtttggttttcagaacagatgttttacagtctctggtagctaattgagttttcccattcccttgattacttcttgtactcttagatgaaagttgagtatgtttttcagtgtttattgctaggaaatagttgattacagagtcatttactagataacaaacatggaaagtaatatgacaggtttttgcttttaattgtgcttttaatttttattctacatataggaaagggtagttttcaagaggtatattgcaaaacatttgataaaaatctcttaagaaaactgaatcttgactcaataaaggaacatatgtttccaagcttttttgacaatattaaaaaaaaaactagtcctctggtcaaataaattgaagaagtttctacacaagagtcatgtattttatgtactgttgtaggcatagtaatgatcccccaaagacatacatgttctaatcttaggaagctatgaatatgttgccttatatggcgaaatttaggagtcctcaagtctactctcaggttcaattattccttaggaggactcatataattcttaaaagcagttacactcatgattacagtttattacaacaaaaagataaagactgaagtgaacaaagaaaaaagttgcatacaaccgggttcaggaaagaccaggtgccaccttccagttttcctctcctcatgaagtcatctggacagcatttaattatcccaacagtgatgtgtgacaacacacacatcgtattgccaacgaaaagttgcctaagtcttggtgtctagaattgtattggagtttgtagtaggcatggaacactcacatggctgactttagtcatctccagcctctccagagttcaaactgatacagtgtaacctaaaagctgcaccatacattattaaaataaactatctggtattgcccagaagccagtcaagagccagatatttctttggaatgtacagagtttgaacaacccagtcccgttaagttaatattttaccataaaaaggcaaagtttactttgcagatttgattaaattagggactttgagatggtaagattatcctggattatgtggatggaaccaattaaaaataagcacaaacacacaaagatccttcaaggtggctaggtgcggtggctcatgcctgtaatcccagcactttgggaggctgaggcgggtggatcacctgaggtcaggagttcaagaccagcttggccaacatggtgaaaccccttctctactacaaaatacaaaattagccaggcatggtggtgcatgcctgtaatcccagctacttgggaggctgaggcaggagaattgcttgaacccaggaggcggaagttgtagtgagccaagatcacgccattgcactccagcctgggcaacaagagtgaaactccgtatcaaaaaaaaggaagaaaaaaatccttcaaggagtcaaaggagatgttggaatgaaaagcagtgtgtcagagtaatgtgatgtagactggaagatgctatactgcttgctttgaaaatggaggaaaggggccatgaatcaaggaatgtaggcagcctctagaagctaggaaatggattctcccctagagtctccagaatgaacagcgccccattgacaccttggttttagtccagaactctaagaaagataaaaaaaaaaaaaaaaacaaaaaaaaaacaggctgggcacagtggatcacgcatgtaatcccaacactttgcgaggccaaggtggacggatcacatgaggtcaggagtttgagacctgcctggccaaaatggtaaaagcccatctctactaaaaatacaaaaatttgcttggggtggtgatgcacgcctgtagtcccagcgacttgggaagctgaggcatcagaattgcttgggcctgggagatagaggttgcagtgagccgagatcgtgccaccacactccagcctgggcgacagagtgactgagactctgtctcaaaaaaataaaagataaaaaatatatgtacatttaaatcactaagttcatggtaatttattatatgagcaataggaaactagtagagtttaatataattattatgtctatgtttgtgtagatatatacataaatgggggttgtgtgtgtgtgtgtgtgcgtgtgtaatgtcaaagcaaactttccaaatgcttacttcttgtacatcttaacctcaaggcacacaaacacacactcagttgcataaatgcacattctcacattacacacacacacacacacatatatatgacatactacattctgttctagcttcctttaatgacagctcacaaatatgtgagtagaatacactgggtttgacttgggattatgaaattcatggtaaacatcatcaaggcagatggatatctaggtgtttgattatattgatgaacaggttttggtatacaaagtgacacttgttattaaaattttgatttcatacctatttcaaactaaattgcacctacagtccctttgcaagctccactttttagaaattcagctttgtattcactgcatttatgacattcctttgcattttttttttttttacatccacttcgcttaacaagaagacactgaagttctaagtagcactgtataggactgaattattaatacagttcttcagttggtaacaagaatgctcttggaaatatcttgtacatttgtcttctcctggttacttagtagattgagcatgtaaaaaaatcttttgcttaaaattgcagtacatcttaactgacaatacttcttaaccatagtgcctgacaaaacctggatattataatctcgacgtacaatttggtccagcagttgatctctgctcagatcattcaaaagggcaattagagaaagtcaacaatacacatgtctgtaatttagttttctgtacaaacaccataaccaaatgggatgaaaggatttaaccatttgcaactaaaaacagtatagtgctttataaaaagggcctaatcaagcagtatattgattgaaactttgtacagatggttctcattattcacacattctgtgtttgggagttctcaaaacttgctaaatttaatttgtatccctaaaatcaatgctcatagcattttcacagccatttgtgtgtatgcatagagtggtgaaaaatttaagtcacccaccacacatgttcccagctgagatcaaaaaaggaacactctgcattcttgcttcaggtctcatacggtaaacaagtgtcctttcagcggtgtatttaatgctatgtttttcatatttttatgctttttcttggtgattttgctgctttaaatggccccaagcatgatggtgaatttctgtctagtgttcctaagcttaagaaggctgtgaagtaccttagaaagaaaataggttccttaggtaagtttccttcaggcttgagttacagtgctgttggctgtgtattgaatgttaatggatcaataatatatattcaataagatgtttttaaacagaaaaacaggcaaaatgggattatacattgctggttcacaaaaatgttatgagcagaggctcccagaaatctatcattgtatttctcctgggaggaatgcttcagtattcactaattcagtgttcacagtgactttatagaaacacagtgaataacaagacttgactgcacattgtcatccttcatccaacccacttgcatagtgtagggtctacactttccaacagtactaaaaacccagaacgacattcaagttatgcaggtgtattatttagctgtatttgggttctaagacatgagtaaagttatatatttgtacagctcccaactatatacagttgtccctcagcatgcacgtggtattggttccagtactctcatgtataccaaaatctgaacatactcacatttcacagccaactctgcagaacccgcacacaggcaaaattggccctctatatacgtaggtttcacattctgcgaatactgtatttttgatctgagtctggttgaaaaaaatggcatgtaagtggacccatgcagttcaaacccgtgttttctcaggactcaactatgttatttatccttttacttttttattccttttttattcctgtgtataaaaaattgtaccaccagtacaaggaatgtcatgaaattgaaatgacaccattctgtgtttcttaaataaatgtcatacaggttctatgaagaataaattctcttgctaaaaaaaaaaacttgctatttttcatcatttgattttctcatattaacatttttcatcttaaatagtctttctctttactatttcccttcacatttcttgaaaattctttttcttgcccatctgttttgtatctccttattattttctttctgtttttattatgctagccatggtaatgataaaatctccgacttccaactccctgcaccatttggcacttggcaaatggcttttttatgtatttatatttttgttatttatatgtctatatcctaaacagaaccctacgcataagagcaggtggccagtaactaatggcattgataaaatagagccctttacctctattttcttgaaatatgctttcaagaaattccttgtactagatcatcgtgtatcataacattatgaacacagcagcaaaaaacaagaaaaaaattcagactttagtattcgtaagtaatgtcaatacaatatttggtttaacagacatacgatcattttgtttgctatttcaccatattattttttatgtaaataaggtagattatttccaaagtctttctgaatttactaaaatctcattttacatgaccctactttagtaccttaactaccaccctcctaggaatatatctgtggtaagaacagacaggtgtatatatattatagataagtgtctgtctgtgtgtatgcatacatatgtgtgtatctatatattaaagtatgtatatgcaatatgaaggtatgtatatatgcatatatatgcatgaattatattaagcatatgtatatatatattatagttaagtgtgtgtatgtgtgtatgcatacatatgtgtatctatatattaaagtaggtatatacagtatgaagtatgtatgtatatatgcatatatatgcatgaattatattaagtatatgtatatgtgttagatatttatgtatatatgtatatttataaaattatgaagttctacattgaactgggatataaagtccatgatatctttacataacttagaacagcaaaactctcgattcattcttgttttcaaaatccctttagcttcattttctctggtgcatgaaacaacataaaaatccctcttcttgccattaatctcttcaaatcccatgccagatattgtcaacattacagctataaaaattttagaatgttttagggacatcttgagatctttaaattaaaatatccactaaattaacatcataagcctagactcgtaatctttatttttgatctgactttctgtggcttgcaaatttagaatcaggaaatgaaacaatactcaatttttgcagaattagggcttacttatgatgcaaggctaatatggataatttcttaattgactgtatctgctaagacaaaatcaggaaatgacttaattaaaatgaataatttaggtgatattctctatattgtaatccaaattttaaagaagcgaacttctcttagaagaaaaatatacatttaataattggttcaatgttattatagaccttttgtgttctttcagaacataataatggttgctaattttctgggcagaatctcttgataagagagttaaattgactcagattatctgcaacccactggactattgtggtaatggcagatattttttaaatttaattcattgatataaaatatttagtcttttataataagcaattaaacctttgtacttaagccacttcaacaaaaatattacaaaaccattaggcagctacaataggctccatgcatttttaagtacggtttatacagaataaattatttctgtattggaatatcttcttaataatattgatgtttcaagaaaacatccaagctattttataagttatttgaatggagactgaattatatagtagttttttgttgttgttattttaattcatacaccttttcagtagaaaaaggtgccttggttttaactttgttaccccacaagcacagatattaatttttattgcattcttcactaaagtacatcttgcatttgattttcagacatggataagaccatgatagctaatgaatgactaaaataaatcaatactccaaatacttctatgcttcatttttgatggaagtatgagtaagggatacaagctgaaggcctcctatatatagtacttctacattactttttttgttataattttgtaataataatataatcacaccacatacttgtaataaaaatataatattcatctaggctaattggtcaggtcctgaagtaaatatatctcttcacaaaaggccaatgagtgacccacctactggtagattttatgcaaatggttgcatcttgtacacctttattattttttaagtatatttgtttcctacttgtaacctattctaaaataaaaagtttactatctctttgcagtaaaaataaatatcacatatctatatatataaagatagatatggtatacacctcagtatagatataaagctctttatttatttatttgttcatttatttatttatatttatgtttaaatacagacagatttccagattttaaaatgcatttcttctcactgaatattaagggacttaaaccatatactcaatttgtcaaagctgactggggaatataaagaaagggctagatatgtaatatgtgttgctaatattaactagaatcattattttgaagtacagatcttagttcaataacatagcgcgctagagcagaccaaagttattaacttcaattgataaagaattatgaatataattataatcctgttaattatttaacaccgtgaattatgcaaatgcagcaggtattattaatcatctgcaggaaccagaacaatttccctaaaagaacatataaatattaaaaagtctgacttggctctgttatgtactgttagagctttagtgttcccatatgaacactgtttggattcaattatcctttataacatgaaaaatgccccgaatgcatcctctccaaaggccaaatgaatgtcattagagttctccttttgtctataaaatgtttactgactgtgtggtctcgcatgtttgtttatatcaaaatatctttcatcctattaggctaatactggtctgtggcggctggcatcctacttgctaatagcacgttgtgtggatatccttgctgtgagactaagctacatgtgatagtcttgcagtatctaaaaaaattcccaaaattaacatatgttgaaccttccctcaatactaaggaacaacagagcattcaatggagtaattttaactaatttcctaagtatgctcaccctttacagaaaggaaaaaaagaaaaagaaaaggaattccaaattggacctttggaaaacactcaattggggagaggaattggtaaggggcttgaagatctagtttggttaacagattgttgtaaattttcctgaaggaaatattagccctttcctttaaagagttatttgtggaaacctttaaaaaggattttcaaaataaagactgtttgcctcaatatattggagtttaattcctatccatttttactttatttaaagttagacgattaattgattctcagaaaaattatttgttttaaaaggaagaattatttatttcgaaatctcaaaatatttccaaataccactgtgattcttggaatgcaatctttcttgggaaaatgccaaagttgggcaaagactggggtaggagttaggagagcaggcaaggacatgtaggaaggaaggcaaactagggaactattgtgtttttgaatcttttaaactcttagcctttagaacaatgtctggcatagagacttccaaaaagaatggttcaattcaatgtcataagtagcttgtcatttatggcacattcacaataaatgacagtataaatcaactgcgcattggtagacataccagagtcatgactatttcaacattcattttatccatgtgtttccaagtatgataatagctgaacattacgtggtactcaatgaaatttagatttatgtttatgcctcacatcttagcaattatatttgaaaaactggtgtctgtacagaatgttacagtttaaaaaggattttggatgagtaacttttgaaggaggtaggatttggggactctaaaatatttttcttcttatttttattgaatttctgcctgtgactgctttctaccctaacaatagaggcgctgcttactgtgctgcctgctgtatctcactggaaccattagtacttacaatgggcctttctgatctttatttctatatatttatattttttctgagatggagtctcgctctgtcacccaggccggagtgcagtggcgcatggctcactgtaacttctgcctcccgggttcaagtgattctcctgcctcagcctcccaagtagctgggactacaggcgtatgccacgacacccagctaattttttgtatttttagtagagacggggtttcactgtgttagccaggatggtctcgaactcctgacctcaggtgatccgcccgccttggcctcccaaagttctgggattacaggcgtgagccaccgtgcccagcctctgatcttttactctttctaaggatgactcgtgagtgaaatgtcaaactcttttatttatttatttatttttacaaaattaaaaaagatataatctgggaaaaatataacatctgaatttttattatatgtaagtctattaggtggaaggtagaaatagggccagccagtagaaattgaattctttgcatgaaggagagcaaatttaggtgtaatataagaaagaactttctaatagctaaatctgtctcgagttgcaatgatcatgcattcttctctcctcttttatttttggccactgctggatttcagggatcatcatctggactctctctgctccaatacatacttggaatctatttaatcaatgttgttattaaaaggatataattttacatactttaaaagaattttgtccaatactcctcaaaacaatccaatgagctaaatattaatatcctcattttgcagataagtaaactgaggcatagagcatgtattagtcagggtggggataaacaacttgtccaaagtcaccaactatttgagagcacattgaaacttaggcagggtagcgccatagtatcttgttgtaatatctactctatgctgcatctgtcctcagtattacagagacagagtctgggtccccatggctttgtactaattgagactttggattgtttgccccaattttcttctccagactcactttccaacatgacatttatattgctgtgatgtagccacatagaatctctcacctctcacccaaacatgccaggagttttcaagcctctgtgccatttgcctttcccctccatgtcccccacacccatcacagccctacttctaccattctatcagtggaaatctcctacttatttcctcaattaaatgttgttccctctatacatttagcaaataccaggcccatttaggtactccttcctcattttagccaaagcttcagattttcagctctactatgaccatacgttatattaaatcatgtatatttctgttccttgttataaactggaaactgcaagatcaggaaccacatcttcttcatttgtgtacctttagacttcaataagtaaatgcattaaaaatttgtctaaatgaatgatgcacatgtaacataaagcaagagtttcttttcatagtaagtattcaagcaggagctaaattgaccagccagcatcactgtggtaaagaagacaactgcatagggagaaaggttaagctggatacttgtctctatggcctttttgtagctctctcattgcaatttcatgtcatgccttacagctaaaaagtgccagtcagaaatacctatccattgtgtgtggctcaggctagttgattatgatccccaaggcctagttcttagaaaatgtgtttgtattatagtccaaaaggagctactctctgtctcctttcctcactaaattctcttttatatttttcaagtttacagaagctatatttgggcacagacttcagtaatttttcctctgtgcataaacactcaaccaggaaatatttatccctcagagacactgacaaaagatgtgttcttaagttattgctaagaactaatccttttcaccatgggaggaaaacgtaatgctctataatgtgacttatgagactgaaggttttttataacatagaatgaaatgataagagaatactcttgaatatatgtttgtagttaattacagaagtgtgcaaacaaacttctgacattagtttgttttgtctcctaaattaggtatagatttcttttttttttttttgaagttatatttggcattttttttaaattttattattattatactctaagttttagggtacatgtgcacaatgtgcaggttagttacgtatgtatacatgtgccatgctggtgtgctgcacccattaactcgtcatttagcattaggtatatctcctaatgctatccctcccccctccccccaccccacaacagtccccggagtgtgatgttccccttcctgcgtccatgtgttctcattgttcagttcccacctatgagtgagaacatgcggtgtttggttttttgtccttgcaatggtttgctgagaatgatgatttccaatttcatccatgtccctacaaaggacatgaactcatcattttttatggctgcatagtattccatggtgtatatgtgccacattttcttaatccagtctatcattgttggacatttgggttggttccaagtctttgctattgtgaatagtgccgcaatgaacatacgtgtgcatgtgtctttatagcagcatgatttatagtcctttgggtatatacccagtaatgggatggctgtgtcaaatggtatttctagttctagatccctgaggaatcgccacactgacttccacaatggttgaactagtttacagtcccgccaacagtgtaaaagtgttcctatttctccacatcctctccagcacctgttgtttcctgactttttaatgatcgccattctaactggtgtgagatggtatctcattgtggttttgatttgcatttctctgatggccagtgatgatgagcattttttcatgtgtcttttggctgcataaatgtcttcttttgagaagtgtctgttcatgtccttcgcccactttttgatggggttgtttgtttttttcttgtaaatttgtttgagttcattgtagattctggatattagccctttgtcagatgagtaggttgcgaaaattttctcccattttgtaggttgcctgttcactctgatggtagtttcttttgctgtgcagaagctctttagtttgatgagatcccatttgtcaattttggcttttgttgccattgcttttggtgttttagacatgaagtccttgcctatgcctatgtcctgaatggtaatgcctaggttttcttctagggtttttatggttttaggtctaacgtttaagtctttaatccatcttgaattaatttttgtataaggtgtgaggaagggatccagtttcagctttctccatatggctagccagttttcccagcaccatttattaaatagggaatcctttccccattgcttgtttttctcaggtttgtcaaagatcagatagttgtagatatgcagcattatttctgagggctctgttctgttccattgatctgtatctctgttttggtaccagtaccatgctgttttggttactgtagccttgtagtatagtttagatttctaattgttggagagagaatctgtttacatattggtgaccgttacaagcaaatctaaaatataacatcattttacatcatatattaaattatattaaaattcattaataaatttgaaaggaattaattcatatttataataaataacttcagaagattcactgatttaatggaaaaatttgttgataaaattatattaagagaggaaacaaaagacattaaataaatttgaaatgataaatattcagacatttaaaaaattaagtgtattagttcattctcacactgctataaagaaatacccaataatgcataattcataaaggaaagaggtttaattgactcacagttcagcctggctggggaggcctcaggaaacttacaatcatggcagaaggggaagcaaacacatcctcatcacatggcggcagcaaggagaagaatgagagccaagcaaagggggaagtcccttataaaaccatcagatctcatgagaacttacttgctatcacaagaatagcatggggaaaccacccccatgattcagttatctcccactgggtctctcccaccacacagggggattatgggaactacaagatgaaatttgggtggggacacagacaaaccatatcagtaagtatctacataatccatttgtaattcttcccatcccatattcctattacccaggatttgtgtaatctaggagacataaaacttctgaatttgtattatatgtaagtctcttcggtggaaagaagaatgttggctttattttatcattttaatcttagaagattttaaaaccataattcttaactgaaactaagcttattttggcttgttatatataccacataacttaaaattttaaaatgtaaaataccaaaggagttgaaaattatgtccacacaaaaccctgcacatggatgtttatgacagctttattcatcattgccaaaatttggaagcaaccaagatgtccttcagtaggtgaatggataaataagatgtagaacattcagacaataagatgttattcattgctaaaaagaaatgagctactgagccatgaaaaacacatagaggaaaccagtgaacaagcaaatctgaaaaaatctacatactatatgatttcaacaatacgacattctgggaaagcaaaaactatgtagacagttaaaagatcagtgttttccaggggctgtgagggaaatgtatgaatacgtagagtccagaggaattttaggacagggaaattctctgtaatgatgctataattgtgaatacatttcattatatatttgtccaaatccatagaatgcacaacacccaagaatgaacctttactcttaactatggaattttggtgataatgatttgtcaatataggttcatcaattgtaacaaatgtacccgtctggtgggagatgtagatagcgtgggtggctgtacgtgtgtggaggcaggggatatatgagaaatctctgtaccttcctctcaattttgctgtgacgctaatactactctagaaaaattaagttctttaaaaaatgtgcaacactactaataccactatagaaaaatggaaagagtaaagagaacaaatagcttaccgcaaaagaaatataaatgcccaagaaatatgaagatatgctcacggaattagtagaataactaaatcagtagtttttaattttaaatttatttttatgtaaattttacctatcaacctagaaatggtgaatacagtagaagagtcagtgaagtgggcatgccctttcttgttggtgaggttataaatcagtctaatggtttttgaaagcattttggcaatatgcataaagagtgtatttgaccctatgacccagcaatttgtcttctgagactcttccctaaagacatgattaaatagtatggacaaggttattctttgctatgttacttttaagaaaagtggaaatgaccagcaacctaagtagctgaaaaataagggtcagataaacaaatcttggcatatctgttgcaacggaacattaagcacttattaaaattatgttttcaagaatatttagtaagatgaataaaaattgatcacattataaaaatatatagccaatatgtttaatactatgaaatatgtgtgtagaaaaatgaatattaaaataaaatttttcaaaatattaaaacttaatatcttacatgatgaaatgtgtcatgtatgtattttatcttacaaactgctatgatctgaatgtgtcctacataattcatatgttgaaacttaattgccaatatgatagtactaaaaggtggaggacattaggaggtgattaaatcatgagggcagagccctaatgaatgggattaatgaccttataaaaaggctggtgagaaccgagaactaactaggctcttatatttttccatcacttccactatgggaggacacagcatcccttctctctggaggatgcaacgttcaaggcatcatcttcgaagcagagactgggtcctcaccagacacctcaccagcctacagaactgcgaacaattaatttctgttgtttataaattacctgtctcagatattttgttataatggcgccagtggactaagacacaaatattttcttacaacaaagggaaaaaacttactgcataattttgtaaaatcgaattggaatgagatacactgtgttcacaattttaaaaagtttcacaagggcataagatcattatgcttggcatgtcttccttaaaaaaaaatataccatgaagtataatttctaagcattatgtagagagccacctatttctgtctgtttggagtgggcagggtatccacacactattttgaagaggtgcttgcaaaattgagatggaaaaatgtgtacgtacagttcctaaggccttacctggagagtgaattgccctggtttttacaggtaataccacttggaaggaaactcatgcttctccctaaatcagacaatgcctggccttgagtggtgtcagggtcctggtgataatggttattttaacctcctgcttttctacttctagcatattctgcctttggcttcatgcaaaatactgaaggacagcgagtgcatggatactgctttatcgaaccttgttaattggtctctttgctataagaaatacattgtccctgaagccacaatactaacgcgactggttctacatcttaaaaaatctttgatattttacactgtgtctgttacatggctattatgtttaaactcccttgattagattatagaagtttacattggggaagagtatgtaaaagagacagcaattactgccaaaatcttccccaaatcagtgtcttagtccttttagactggtgtaacaaaaataccataaacagggtggcttataaagaacagaaatttatttctcccagttatggaggcggggaagttcaaggtcaaggtgcaggcacgctcactgagcttccaaggcctcttgggcctctcttataagggcattaatcccattcatgaaggtagagccctcatgacccaataaattcccaaaggcactaccttataatatagtcatcttggtgattagaattcaacatatgaagtttgagaagacacaaacaatcacagtatggcatccaaacattacaaagagttatagtttgtctccacagttagcttagtattaaattttcctcatcagcaagataggaaaaggttagttgaggatgaaccagaagttttcacctgatcatattgacatgggtgcctgataatctcatgcctttatgggaattatatgttcttcattaaaaacaaagaattctggcctttgccaatgatggctttaaactagtacaagcattctgggtgtggctgtggtatttgatcaaagctaatatttgctaatttgcatgttcaatgcaacaatcataaaatactggatagtttcaggtctagtttatgcaccacaaaaaagcaatgataaaactcattcatcttcactttaaagtcgttgtgaagtggctgtttccactgggaatatataggtagcatgtaaaacagttgtcttttctggtaaaggggtttcttgctaaggcgtgaccacaaccaagtgattctttctcttttgattagtattcattgtctcttctgagctgtctctagtggatacagtttagaaatttaacataaagaaagaaagagctctcacactgtaggatttgcagcatgctatttaagtgcaactgctaccacagttaaaggatcatcggaaacatcaaggtgaatgggaaagtggagagagtcaaaattcaagaagagacttttatattattaaaatttattcaaactgtaattgtaaaaatggcatggaggaaaagttaaagtcgaaaatatcagcagtatgtaaaaaaggacaatgtaaaacatctaccaattgtcagaatggctagaaaaacatattccattattcagccaaatattcttgcctttacctctccctgttctttacctgtccacccctagactgtatctttcttgcatatttcattttaagattcttgcacataatttagagaactgaagcaactacctagcccatctttcctcactaggccttccttagaatctgcacggagtcaagtttatggcccctttgaaaagctgcagctccttaccaaagttttttcaaatagaagctaagaagggaaggagtaaaagacagcatttgtataaacattagctcatgtaatcactataaccacctatttaaggtagatgatattaatttcattttcctgaggaaacttactgccattcagatcaaaagtcttctgcaaagtcctacaagtaccaaaagaaaaagtcagggtttttacctatatctctctaactctgattatgtcatttttcttttctctcattttggttttcaactatagagtaacataataaccacttactctcaggaaaaaaaaattagaataaaaatttgcagaccttgcttataaagatttaattacatttaaaataaatagagaaaatatttggaaagtttatttttaataatgatgagtttcatttaagttatgtattctctgtacctattatgaaatatattctgtgaagttgtggttatctgatacaggtggaggtggtagacattaagactcttgatagctgttccgcttctgtcccctttctggtacgtggaatcacttccgcactcacttgaagttgagtctggctgtgtgacatgccggatcaatgaaatgtgcgaagaagtgaactgtgtcacttttggacagatgttctaagagccattgaatgttttactgtgttctgttttctctcagacctatcaaccaacaacactcaaaagttggctgctttatcttcctgagaccaacaacactcaaaatgttggctgttttatcttcctgagtgattacagtatgtagccatcccctgcttattaggataggcacagagtatcagcaagaaataagatactaagagaatagaatttgttattactaaagattttcctaaagtgtccgatacgctcaacattgacgattgttttgcagccaaaacagcaaacatatttaagaaatgtgtttaagaatcacatattgaatctgtgattcacatttgttgtgatggtaaaatatttgtgtagttttctccttttttcagcttctattttaaataacataaattgtttgaaattttgttaatggttcttgaaattaaagacgttcagcaatgatatggtcttaatagaaggaaattgttttccatcactgaagattaattaaattttgagtaagaattgagatatgtgcggctaacacagggaattatctctgtgtttctggatgaaatgggattattaaaacatgaaggaactattttcctcttacggtaagagaacagtaacttaatagtgaaaatcagttgatcatcacatgcttgtggctaaatatcagtttgtcctttttgtagctgctgtaatgatatgttattgaaatcatttagggatacttttttgttgttaatttttatggaggtattattgagaaataaaaacattctatatatttaagatatacaacacggtattttgatataattaacatatccatcaccgggcatagtagtctcttttttttgtgatgagaacacttatgatctactccctcagcaagtttcaagtataaaggacattaatattaactacagttaccatgctgtacgttagatctctataactgaaggttcctactctctgaccaacaactccccatttataccactcctggcaaccgctattctactccctacttctataagttcaacattttatattccacacataatatcatgcaacatttgtctttcatttttttctgcccttatttcacatagcatatgtcctccaagttcaccttgttgcaaatcgcaagatttccttctttttatggctgaataatatttcattgtatacataccataatttctttattcatccatacatccacaaacacaggttgtggctatatcttggctattgtgaataatgcagcaataaatgtcagagtacagatatatttttgagatactaatttcatgttcttcaggtaaataatcaacagtgaaattgctagatctcatggtaattctatttttaatagtttgagaaacctccctactattttttttgtaatggctgtaccaatttacattcccacaaacagtgcatgagggtttccttttctccaaatcctcaccaacacgtatttttaaagatacaatgagacaaactttttatttaaaattatagaacaagaatgaatattaccaattcatcaaaaaaaaagtctgtctactatcaaagtctatttttaaactttatgttcttttacttaaatatttttggaaaaaaagataattatgtacactaatgtgtgtgtgtacattcacaatttggcatatactattaatttggtttaaatttaatttggacataataattcttaaaacttgtcagactgcttgataagtaggtattagtgtatcccacctcatctacagagatgaaaactacagcgtaagttatctaaaacagtaagtgtattggatctcaggaagtatcacttcagaggtgttattcttaacaataacactattcagcaaatgctgcaagaataaaatcattaaaataattttctaaacatcaaataagccaaagtgaatgtaagcttttgtgaataagtttagattcagttaaatttctcaaggatcagctaaattttttaatcaaaaatttcaaccaggtactaaaactattttttgtgtcttcctttgacatatgggctatgtatatgttatataaaaccaaataatgggatatttctgattattatacatttgaaacatatcattgtgtctagcttcataacgtagctatcatattttggtaagttaaattgtatgtcaaatgggtgctcagtctggaagactcaaaaactagaatttttcttttttctaaaatttagtaataattgacaaataaaagcatctggtaccattatacttcctacagtctatattctcctatcatgataaaactggaattcatattatattgaaaaacctcttatttttttcttttttcttctttaactacatcctacagtgtaccctagaagacataaattcaaaaatgtgaatagttctgagaggttttcttgggattttaccttttatgaaactgctataatttatagaatctgcttgtgctctgtcacctaaatttaaaaagctgccttttattatttattttttagtttgctccattcagacagtgatgtttcatgtgggagacatcaccacaatggattactttaacttggaataaccttgctttaataattatatggaatacctttcacaagagaaagcattactaggagaaaagccaataaagctatgaaagacatggataaaagtcaacagctgattggatatagaatctaaataatgtgatatgatttaacttacctggatctcataggtaaaatgaagaaatgatagttacatatcagaattcatatagaatatatgtgagataatgcaaataaatattttagtatcatatttgtcacaaaatagtttgtcatcacatattagctcatcccccatggatgtctcttgtcatacggttgatagaattctgtgtccatttgtgtaattttagctccctaaggatagccactatttgtcactcactgttttatctagatagcacagaaactgatagggagtagtcaataactcagtaaatgtttggccagtgaatggatttacaacatccctgtggaaataatggtagatgtgggtctgtttattgcacaccgcaattgtcaggatgtttattgcataaccagttgtcactggttagtctctgtgtttgtttctgaatttgtttagaacaaggctttatttttactaaaaatataacttgagttgctgacgaattttcagtttttactcatttaccttgctgatatagctagctgaatttacatatctatgtcactatttgtatttatctttatctccatatatttatattatatatacttatgtctgtatctctctatatatgtctctttggggatgtgtactgtgtaggtatattttaaccaccagctcagtgagaaagaactcaagctatgattcttagtgtttgcttatttctgtggtgtaaatacttcaaccacatccagtttcaagctatcaacatgatgttgctgagtgtggagctgggatgagataggtagtggccaattattatatagcattttcaccatacagataaaaggatacaaataacctcacaagtgtagacgacagtgaaatgtagtaaaataattaagaagtgatgagttttgaacatttattacagttgctttaatataatttatttaatcataagtttatttaattttaacaagggctatgtttaatagtatgccctcaaaattccttaagatttagcattcagctttcacaatccatagtaaatctttaatttcaaagtctctgttgcttttcattgtaaaactaaacgtaatccatgctttaactcttttctggttgttttcatatgtcctttaaattctcgatgttttgtatgtttctacagtgaatatttgtgagttgaaactttttaaataattcaagaatatacttttgtgtgtgactttgaaattgtatatactgcttgtatgatttctataatctattgccaagggtaataagagctagtcttaaaatcaaaaaggcactatattactctttgattcccttttttttttctcttaatgaagctgaaataactgggcactgaagataaaatatatgttaactagaagagtatttgctataaaataaaaaatttgacacattttggcaaaagttttttttttcggtagtaaacattttactacctagtatcaaatatattaaacttaataaatataagaaaacagagcctacaaatgcaaagtctaaatcctaatttttacctgcaattgttacttatatgagttcatttttctaaattaaaactaaatcaatctactctacctcctattcatggcctctgccactgcagtcctgaaggttggggtgaagatactcacattttacaagtttgtgaaatattaactaaaaaactatggcgaaatataaacatgaacattttggagagaaacacttctgaaatggtagtgtgtagtgtcaggggctccatggatgctgtcccgagtaaaacaactgtaactggtgaaaattgtaataaaataaccatggaaagtctctggaaatggtcttaagagcatatagcaaatggagaaatatttattcaaaacaaaaaaacctgcaaaatctcagtcagaacagtgaaagttaatgacatttgagcaacaatccccaccccaaccccactctctctagctctgtgtgacagaaactttactctggatagacatggccaaaaacagggtgcttcttctacgtgattctcttcttctttttacttatcagcagaagctgctgtggcttatcaccacgtctggtcatagctgaagagatgtggctgcttctgtatctcctgagctaccacacctagcgcagatccttcctctcataaatgagggagaggctaagaccatgaaaatgagaaagaatcatcttttaaacaaacggtgctgagaaaacttgagattcacatgcagaagaatgaagttgaccctttacctcttggtgaggaagaatataaaacgtttgggcagttatctaccttttggacacatacttaatattagctacactatgaattattggtttggggtgagttagtgagaaacgggttccttttatatgtttagcctagaggcaggtatcgagagagggcttaaatgaacatcctacaataaagtttaaatttttcatcctccattgcagctaggtatgatcatgtgacctggttctgataggacataataagaattaatgtgtgaaacttctaggaagagaagtccatcttcccctatcttccttgttatttctcactgttacttggatggcaatgtgatgattggagcttgaatagccatctggactacaaaatggaagttgtatgttgaagaagacaaactaataatataaattgtccaatgtccctgatgatcatggagccactgtactgcctctcaactgtctcttcttatttcagaaagatgcaaacttccattgttcctgatattggttattttggattttctgtcacttgtagctcagttctaatctcaatgaatgcaagagtcactgacaacctgctatagccaaggtactatattaggcactgacaggtctagggtgaaaaagagacatcgcctggttttcacagagcatacttactagtgagaaaagataaaaatcaaatatttaaagaatatgattttgagggataatcacataacctatagtgagtgaatctggatttaagggcttctcaattcaaagaaaagggaaggccactatgaagcagtgatagctgagctgatacatgagataatagacagacctatacatgtgatgatctggataacagaattctatatagggaaacaggaagcacaaagggaggaatggactaaaaaaagagaagcagaaaaattgacttgtgtggttggagtagagagggcaatggtaagagcaacaatgggagatgaggttagaaaatagagtaggagtcaaatgaaacagggtttaataggtgagggataaaagcaaaaccaaaaatatatacttcagaatcttgtcctggcatctgtttttcctccaatcatctcctcctttgtatattttctttcttttttttcttcatctatatatcttctcatttcattcattcaatcacctatacaatgtggtccactgtctccagaatccaaaatccaggattgtatcctactatttttttgtagattttctacattcaattgtacataaaaaactggcctaggaaatccgcaccccatcgtaatttgtattacaaatttaaaaccagtagctctcaaatcaaatttggataagaatcaatgtactactttgaagatcttccgaatatgtatatctgtttataaataacatatattttaaagtgttaacttatgatctttcattgatacatttctgttttataaaacatgatattcatgatagatctattttattcatttcaacatagatattatcttcgctactcttttaaaatagttttgaggttccaacacccagaaagtgttgaggaaaatttgtatcttctaatggtactaaatataatgtaactgactttgagctgtataaaaaaatgattccaaaatgagtcctaactcttggttttaaaggtgatgtaggtgtgaagggagatgtgacaaaaccccaaagattgttacggaagttttggggaagggaatgaaaacaaacccaccgtggtaattactcctaagattgatgaaaatagaaagtcttgtgcagtattagtagtggaatacatacattcttataaatttgcttgagataatgtggacaatgtgtattaaatgttaaaattggcatatataatttgcatgaatatacaaatgggttacatcttattccctaatacaagtgtggtcaaataaattatataagatttataaaatagcaaattatgcagccatcaaattattgaattgtttcagtatataaaagtagaaacatggccagaaactattgaaaaatattacaagtgagttacaaaacaatatatgtagtaggatttttagggtaacatatatcgaagcagaatgtgggaaagatgaagacggagacacagaaaaaactgtcgtttggaaatagtcttcaaataaattgggtgtctatctcttggcaataaaattataagtatttctctttttatttatatgtagctttttccagtgaaataataattattataataaaaagactttttaattcaagacaaaataacgagaacatcagtgtgattagaaggcattacatggggataaatggcagccatgtcatctgcaaacagagacaatttgacttcctatttgaataccctttatttctttctcttgcctgattgccctggccagaacttccaatactatgttgaataggagtggtgagcgagggcatccttgtcttgtgcgggttttcaaagtgaatgcttccagcttttgcccattcactatgatattgtctgtgggtttgtcataaatagctcttattgttttaagatatactccaacaatacctagtttattaagagtttttagcatgaaggggtgttgaattttatcgaaggccttttctgcatctattgagataatcgtagtttttgtcattggtgctgtttatgtgctggattatgtttattgatttgcatgtgttgaaccagccttgcttcccagggatgaagtcgacttaatcgtggtgggtaagctttttgatgtgctgctggattcagtttgccagtattttattgaggatttttgcattgatgttcatcagggatattggcctgaaattttctttttttgttgtgtctcataattggtgggaaatacatatatgttgagaatatatccgttgtttgaaaaacatgacttttatattcaaaagttgtaatctttttatgaagatgcattttcttttttaaggatgaaggaggggtagatgtatttttaagctaggaggaaagaaattcgactttctggcagcttattttgtgaccatgtataaatcaagcaaacaaaagctttcacttatagtaaagttcacttgaagataaaaattgaccaggaattaaagacattgtatgcacttgtctagtttatattacttgagggtggtggtaagatgttttctggcttgtatagcatgcatgtattaaagacctgagacataaagaagcaagtatatttgaggaactaaagtcaagcacagctagaatgaggaaagatgaatgaatcaacatgggttgggggagatatgtaaacagggattacctcatgcagcatcctatagttcgtgtttagcattctggattttataaccaaaaaaataaggagccgcttatgagatttagtcaaacggaataacatcatcatctttatctttttaaagctcattgtgagttcatgtggcagagagactttattgggaatagaggtacttatatagggattggaggatcaacaggctgaggaaagatgaaagaccagtaggaggtcgtagtacttataaagtcataagtgtaatatgattttgattagaatagtaacaatagacactgtttaaaaacactttttagtggtagaatctacgtgtcttgaagcttgattaaatgaaggtgaggaagacagaaatcttaaatgatacaaagttctgacaagagaagtttaataaatagtagttccatttaccaaggtgagaaatatataaggaggagcacatttggggtggaattcgttttgttttcttttgttttttattcatgtcatgttatgtttgaagtggacttgttcagtaagcagcagaaaatatgtgcctggaatatatgcgctcatttaaaagttatttccttttaaataattgctcattctgcagaaaatggctgactttgaatatcagctgttttctttttctttttcaggaaatcattcttgaaatggtaaacatccaagttttatcaaataccaggatataattgcctggtgtgaattattattttgttagtaactataatagataatccacagaaaatcttttggaaataaaagacttgaaattaaaagctatctggaatgttatatttaaggacacagaccttgaatgactgttcttcaagtaaagagtctttgttgacagatatcaaaatgtcttatattatgaattcacctcaacttagaattatgttaaaatgtgtggccttccttgaaacaccacctaaaagaattttcttattgtcaaacaaacacttaaaaaatagtttttgaaaaatgagtaaattggtattgataatcttatagaacatgtgtacagtttttaaaatatattgaatgtaaatagtgtctttctgtgtgaaactaaacaaatattggacacctccaaaaatattttgttctgaaattttccttggattgaaaaaatgactcaaatcccatattctacttacatctttattgtagcatgacttagggctcttctgtgaatgagcgtttacaccttattttaaaaaattatgttttaaaacaatttcctttgaaaataatggttttcaaaggaaaaaaagagcatctagggctcagaaaattttctttatacttgcaattcaaagttattttcctgcagcaatttcttaaatgaagatttttttaattaaaaaaactatattttgttgttgcaagatagaaataataactttgttgttcaaaattgacagagacgagcctaatgacttccttgtctgaccttgtctataaacttggaaacctcacagtctcgtcttcctgttgtcttcggatgtaattttgttggtagctcaggtcatatttgcttgtgtctatagtaactgagcccttttcgactttaggcactgtgcaagttagttggcatatgccacaagaataaaaaataaaaccaacagctattgtctcttggttacaatccttaatgttctaatgacctttctggaaaggtgatatttacgctgagatcctctgaactataaaaattggagggagagagaaggggaagacattcagtacagagaaataacatgtacaatggctcttaagcttcgaagaattagcgaacttagggaaatgatagaggccagcatctgtggagccatgaaatgaggcaggaaagtttgacgggacacctgtgaatctagagtgttttaacttcatcctaaggtcaataggaggccattgaacaatttgaggggatgtcacaatgggatgtacacttgggcattactctgatgctgtttgcagtgagaagaatatagagagggcaagatctcaggagatacagagttttatgttgggtacaggttggccgaagtaaattgtgtttatctatacaataaggttagatgaagtttgcaattgatttagttaaaaaatttcaaaaactggatgaccacataaataggaacagataacctattcggaaatatggcttccccggtccatcagatttcccagtggaatggcacccatgacactaaaggcccaatgtgagatctgcctagttatagaaagtaaaatctttatttttaccttaccctgttcaactgggatattacatcaccacttcgaaagaatttgaactaatcatctatgtgcttccattcaagagaatatttatataaatatctggttttttataatccttaaactaaacctagaataaaaaggccacatcatcatcagtggctcagccagctttccagaaggctggaaagccattcacctcgaggaggctctttcacttttgcggggtggctttgacaagggtagtggcacttatgaaggaaagaaagtagcctcacatgaagtattatttgcagggagcactgacaggctttgcagatgagttgaatggtaggaattgttttggagaaggtaagaatcataaaggattgcctgatgatggattgtggtgtgagtgagctaatattcctaactcagaagcatccattacttaaattaacaactaaggtgtgattgtgtcccagtttagagttcagcttctatttttgcactggcctagtgctctacattctactcctgtctttttaaccgttccttacttttcagatctatataattttatgctttactttttattgatgttgaagaaaaggcatttcttcttcttaagcagctagtatgggtatcataattcagctcaaaatcagttacaaggattttcattgttcaatagtgtaaaaatataataaatatccttgatgcctgtggtgaaatactatcaagcagctaaaaagagtgtattagataagtggttctcaaccaggcatgagtttggccatgaataagacatttgacaatgtctgcagttttttttatcgtaattactgcggaagtggtagcattgtactggcatctagtaggtagaagacagagattctggcaaacatcctacaatgcaaaggacggcctcccccgaacaaacaattatcagtccaaaacgttaaaagtgccacttttgaaaaaccctgtattaattagatccatatctcacaataattatgtaacccaaatatataatattgagtgaaaaaggaaagttgtagaacgattgcaaagcgtgatagtatattcattcttttaatgctagctagcatagcaaaccaaacccacaatttcagtgccttaacacaacagatatttattgtttgctcatgtcacagtccatggcattccatggcagcgtgttgctttcctgcatgtgacgatgcaaggatccagacgtcttccattttgttgctcccccgcatctcttcaacctcagagtcatctgcatacatccatagaatgggaaagaaacagcagagaagatatattagctttttaaaatctgaagctctgaattgacacaaattacttccactcatattctactgggagaaacaaatcaaataaccacacctgcatgcaagaagagctatataatacaattagaggctgaacagcctgtcagcgatactacctgggtatggagtggatcaacatggattcttatggatagctcattagctcaatgaaggatgccaagcactcaagtaaatttgtaaagaacatacacacatacatacacaacaacaacattatgtattgtttatggatataggaatgtatgtgaaaagcagaacaattgagctaaattaatgaacataaaattcatatatcatggcctcttataaagacgagagcaggagaacaggcctggagataaggaagtaaagtgttttcacatgtatttgaatcattttcttttataattagattatgcacaataaattaggacagattattcataattatgatttcctggagatatgtactcattgtataagtctctggacttctctaattttacctttctcaaaagaaaataaataagttgagtaagttggatgtatttgtatcagccaattaacttttatattgatatttaaatgagatataacatctacattattttttacatttatgtaaaattctagatatataaaacaagaatttttataaaagctattgttgttattaaggtatactttggtggaacattgtacagtgttctttatcgtatggtcctattcagattatgtaccaaatgcaatactaatatgctctcaagcttcttgaaaaaaatcctatctacatcacgataatatgttggtaatatttttgttccctgtttattttggtatctcaagtagtctcatcttttcttttagaatatacctgatttttaagtcatcttgtaaatatcaataatgtctttctttcttgcaagaaacagaaacccaaacaaaatacaattcaaaattcaaggtgtatttgtgcatactctggattatctactggtagaacccaagaaaaatttaacctacaggccatgggaatgatggggccataggccatctccatagtggtatgctactaagaatgactcattgcacaaattctcattttatgagtctcaggtaaagtattttaggaagtgcatctgtttgttccaagttgaatcaggcctcaatcttggtccagtcagccttgtcctagaggcaaatatcacacaatacaaacatgatatcaaggactctgcttatggattgtttgactggagggtgatagtcgccagagaagggagaaaaattatggactgagtagaacttcccaaatatctcttgtttagtgtgtttcttgttccacattattttgacagaaagaattctgagttatattatttgatcctccaagtttcaaaatccttacaaacaaaaatgtttttaatgccttcacatgtatgtttctttctatcatgttactttgaattatgaatgcatcaatatgtaatgttacagcattaaatgtatcaagtttgcttctccactacattataacacacacacacacacacacaaatgaattcgtattaaactttttgaaatctatgatttaaatagagagataagaagaataatgactggttcattatattacacaacctatgctttgtatatggttttcttttttaaaaatgtactttgtaagttgagaaaaaaggtaattgacaaaataccagtgtaaattttgaacacaataaaataaaattacatcagcccaattacaaagcaacatgtatgaatagcttaaccaactctcctgttttaggtccttacgtgaaccaaaatcctgttgttatttatcacttattggaaccaaaaagagccacagatgttgctttgaagagcaggatgctatgaagtactgttttaaagaccttattaaacacttcactgaaataggaagtcatttatgtagtcattaatacccctcactgcatttaaaccacagttctcaaaggaaaaagctgctcctctctcacagttttgttgttacttacttttaaaaatcaaagatcaatacctttaatgagaacatattgggaatatctatgtgctacgctctaaattaagcattagggcaaaaaaaaaaagatgatttttaaagtcttttcttttgaattttgaattgagatagaaaaccaacgttataggcccataaaagggcctgtaactggagacaagaagggggaaaggctgaaaaatatacctataccaaatttgaagagagcattgatagtcagtaaatatattgcagcaacattatgaaggtttgtgtaagccatgataaaaagcatagaataaaatatttaacataaaaagtagaagaggctcagcaaaaatttccttctattcacctgtcttaaaaagttaagtatttttatcttgtgtttaatgaagaagaatttggaaactaaaagttccaaaaattaataaatttttggctatgcactgttatgtccttttgttaaaaaacactaattgttgagaaaaacctgattgctctatcatctttttatattcaaaccaaatgtgcttgattaaatgttttagatgtcttattaatagacagtcttgatcttggctaaaacatctatagaaaggcttacgcagtgtgctaggtgcatgttgaactccctgtgttgttcaaactagagacataaatgattaatgaatactttatcatatgttatatgtgtattttatatatatatataaaattatagtcatgtactcatctgtaatttcaagttggtagacatttttgtttgcataattttgacagatttgttttgttttgtcttgttttttgagacagtctttctctgtcgcccaggctggagtgcagtggcgcgatcttggctcactgcaacctccgcctcccgggttcacgccattctcctgcctcagcctcctgagtagctgggactacaggcgcccgccaccatgcccagctaattttttgtatttttagtagagatgaggtttcaccatgttagccaggatggtctcaatctcctgaccttgtgatccacccgcctcggcctcccaaagtactgggattacaggtgtgagccaccgcacctggcctcgacagatgttttcataaaattaaataataaaatacaatctacatattaaagttttatatatttctgtaaattgagatatttttattgtcggcactatttttagttaggttgcttaaataaatactaaatatacaatgaaaacgaacatacctagtacagtcattctactcatcacttggtatagttgatgtttttttttttttttctttgagaccaaattttgctctttgtcacccaggctggagtacaatggtgcgatctcagctcactgcaacctccacctcctgggttcaagcaattctcctgcctcagcctcccgagtgcccaccaccacgctcggctaattttttgtatttttagtagagacggggtttcaccatgttggtcaggctggtctcaaactcctgacctcaggtgatccacccacgttggcctcccaaagtgctgggattacaggcgtgagccaccgcatttgaccaagttgatgttttatttgttattaatttcaaaggctgacatgtacttatgatttcagtagttaccagctactctacacgcagcatggtacaattaaatgtatatttagcttttggaacatttctttttaaaagttgtgcacattttaaaaaccaagttatctgaatcacgtgttaaaacatattaaaacaagactgagaattccatttcggacaagatggcataaactgatttttccctgctcctcatagtgaagaagaacaataaaacctagaaacaaaacaagaggccatcaaaagaaaattgtaaaggatagtcagagaaaagcaaactgctttgagagcctcgcgctagaggaaaataaactgcagcacattctcatatgtgcccctatccaacagaagatggggacccccacctgtcattttccaactttcaagcctagtagcagaaggcagcccagctagtttcctctctgaattgaataggagtctctcagacaataccagatgagcctggtataactggcaagggctattgaatgggagcccatctaacattaagcagctagggtaagtgcctctcctttcccagggatttaggactaccatgctctgctgaaaaatagacaagtggcagtattgtttagaggaattttgtcacagcaagtggcccaacctcggaagcctctttgtccctacaggcctaagacactctcactcactctcactcacaacaggaaatacttaggtggctgggtgcaactgccacaagggattttaccactctaagtggcctagtgcaggaagcctctttgttcctgtgggtctgaggctgccctctattgtacagagatactggggcagccacagggtactagaagagggatccctcaagaacaaaatcccatccagaaagcactgtctgttcccaataggcacagagatcttgccacaagtgtcctaactactgaagcctcttcatacctgcagaactgaggctctcttttccgacaggaagacatcgaggtggaaaggcagaaattacaagagacacaatcataataagtgacctggttcagaaagcatctttggtcatatggacctaggacttctcttccccacccagagatacctgggcaaacacagagcactggtaaggctatccaccacaaagagtgactagcctgggaagcccgttggacgctatggccatgagaatccctccacttttacccagagacattggagcagctggagggtaccagtatagggattctaacacaataatcctatctaggaaacacttttatctctatagatctaagaaacccctactctacctagcagcaccagcaccctagtctggggaactccttctgcccactcagaatgtaccatcaaggatttttgagagtaccagcatcactagataaaccaagcaggcctcaataacacgagaaatactctgaaaataaaactgtctttgggaccacagcccataaaagtagaatggcacctgtgtattgaactacgtatggtaaatacctgctaaaataaaagattgaaataagatccagattctgcatatataatggacaaaatgtccagagtaccatcaaaagtcgcctgcatactgagaaccaaaacaaacaaacaaaactagaatgagaaaagacatcgactaatgctatcacttagataaattagatgttgaaattatctgacaagaattttaaagtagaagtcaggccaggcgcagtggctcatgcccgtaatcccagcactttgggagaccccggcgaccggatcacctgaggtcaggagttcaagaccagcctggccaacatagtgaaaccctgtctcgactaaaaatataaaaattagctgggcatgatggtgtgtgcctgtaatcccagctactcaggaggctgaggcatgagggtctcttgaacccgggagagagaggttgcagtgaaccgagatcgcgccactgcactccagcctggaccacagagtgagactccgtctcaaaaaaaaaaaaaaaatgcaatagcatttatgatttctgcaaagaaaatgaaactcttacatataaaactaacaaaacatgcacagaatctgtatgataaaagttaccaagtgctagtaaaataaataaagaagacctaaatatatggagatacattatgttcatggattggaaaactcaccatagtaaagatgtgaattctctctaagttgatctatttttaagacaattcttacgaaaattttagcaatgtttttgaacttacacaggcttattataaaaattatataggatgtatagaatggcacaggacctatactagccaaaactattgaataaggaaaaattaattagagaaatcactcttactgttgttaaagttaattatatagcagcagtattctagacagtctgatactggtggtgtacagactcatatatcagtgaaacagaatagagagcccagaaatagatccacaaatatgcccaatttatttatttttacagcttaaagtataattgatatacaaaaatctgcacatatttaatgtatacaatttgatgagtttggacatattcatatacctgtgaaaccatcaccacaatcaaataacaaacatcaattccctggaaaagtttccttgtgtccctttgttttggacgaagcaggaatccagtaaggagggttagcctttttaataaatggtgttgtagtaatccaacacccataggcaaaaaacaaacaaaaaacaccttgatctaaacatcagaagaacttaaactgtaaaacttactcaaaaatagaacatatttgggatctaacgttaaagtgttcttagacttgacaccaaagtcgccatccataaaaggaaattttgataaagtgaacctcattaaaataaaaaacttttgctatgcaaaatattctgttaagaagaaatataaccgggcgtggtggctcgtgcctgttaataccatcactttgggaagctgaggcaagctggtcgcttacgctcaggagttcgagaccagcctggccaacatgatgaaactctgtctctagtaaaaatacaaaaattagctgggcgtagtggcgcacacctgtagtaccacctacttgggaagctgaggcatgagaatcgcttgagcccaggaggcagaggttgcagtgagtcgagatcataccactgcactctcaaaaaaagaaaaaaatgaaatacgagctacagactgggagaaaatattggcaaaccatatatctagatatcaagaactagtatcaaaactacataaagagctctcaaaactcaacattttaaaaatccaataagaaaatggacaaaagacaggcacagatgtttcaccaatgaagatatacagatggcatatataaatgcattaaaaaatgttcaacatcaacaaccattagtaaaatggaaattaaaaccaaagtgagatattattacctagtagtcaaaatggctaaaataagaaaatagacaccagatgctggcaaggaagcggagaaactgggtaaatcatatattgctggtgggactgttaaatggtatagccacactggaaaatagtttggcagttcattttcaaactaaaaatggacttagcatatgacacagcaattgccctcttaatcattcttaaaaaaatgaaaacttgttttcatacagaaacgtatccacaaatattcatagcagccttatagtaccaaaacacacaaaaaagtcccttgatatgtaattgcttaaaaaaaaaaaaaccctgtggtacatgcataccatggaatattacccagcaataaaaaggaattaactattggataaacctggtgtaatttatactgagtgaaaaaaaataacaatctctgcttaattttgttgttcacccaaaagtcattcaggagcaagttgtttggtttccatgtaattgtgtggttttgagaggtcctcttggtattgatttctatttttattccactgtggtccaagaatttgtttgcttttatttcaattttcgaaatttattgagattcgctttatggctgagcatgtggtttatcttgcagtacattctgtgtgcagatgagaagaatgtatattctgtggttttgggtaaagtagtatgtagatgtctattaggtctagttggtcaagagtcaaatttaatccagaatttctttgttagttttctgcctcagtgatcggtctaacactatcagtaggttgttgaagtcccccattattactgtgtggcttcctaagtgttttcgtaggtcttgaaaagtacttgatttaggacattggtgtgccaatgctgggtgcatatatatttatgatagttaaattttcttgttgaattacaccctttatcattatgtagtgaccttctttgtccttttttactttactgtttgtgggagtgtaaattaggtcggctactgtgaaaagcagtttggagatttctcgaagaactaaaagtaaggactaccatttgacccagcaatctcattactgggtttatacccaaaggaaaatagattattctaccaaaaatcatatgcactgggatgttcattacagcactgttcacaatagcaaagatgtggcatcaacctacatgcccacaatggttgattggctgaagaaaatatggtacatacacatcatgaaatcctatgcagcaataaaaaaagaaaaaaatcatatcctttgcaacaacattgatggagctggaggacattatcctaagcgaattaacacagaaacagaaaaccaagcaccacacgttctcacttataagtgggagctaaacactgagtacacatgaacataaagatgagaacagtagactctggggactacaatcgaggggagggaggaaggggcaaaggctgaaaagctacctattgggtactatgctcactacctgggtgatgacttcagttgtaccccagacttaaatatcacacaatatactcttgtaacaaacctgcatatataccccctggatgtaaaataaaagttgaaatgtaaaaaaggaaaagcaacaatctaaaatgaatgtatattgcatgtttccatttgtttttgcttgcttgtttgtttttgagacaggttctcactcttgcccaggctagagtgcagtggtgcgattgtagctcactgcagccttgaagtcctgggctcaagtaatactcctgcctcagctttctgaatagctgggactacaggcacacaccaccacacctggcccatttttaaaaattgttttgtgtagacagggtctcactatggtgacagaccaggatccctggtctccagcgatcctcccgccttgacttctcgaaatgctgagattacaggtgtgagccactgcatctggtctctatttgtgtaacatttctgaagtaacattattatggcaaatagatgagtggttgcccgcttgtgaactcctccaccttgagggctcagaggctggatccatagatatagcagaatgtgtttgtgtgtgtgtctatgaaaaggagtaggaggctgagggtgggaaaatgccatggaagcaaaatatgattgagcatgactagcttctcttgtgactgttcagcccaaaatgtccaggagtcataaacacgttgtgaaagaaatttccagggcatgcatctcataaggacgtgtctgcttgtgggttctcaggaaactgcagaccctgccctgcaagtctggcctctctcatggacagtcagagggccatgaggttgcattttttaaattgaggtaaaattcacataacataaaagtaaccattttaaagtgtacaattcaatagcatttcgtacattcacgatggtgtgcaaccatcatctctattttggtccaaaatattttcatcaccccaaaggcaccactgtatccatttatcagttagtccacactcctccctcacccagctgttggcaaccacgaaaccactttctgtctctaaggatttgggtgacctggtcttcatgtcaatggaatcatgctgtatgcagccccttgtgactggtttatttcactcagcataatgtgatatggattgggggaaggtggcaggtggcctataaaaggataacatggggtgtcttgaggtgatggtacatctaccacttgtgttgtgcttacgtgaagtgatctatgtggtaaaattgagtataactatatatacacacacacatacacacacaaatgtatacgtacataaatggtgaaatcagaagaaggtttatggattataccaatgtcaattcttttgatattataccgcagttttgcaagatgtaaatattgagtgagcctccgtgaagggtgcacaggaccttcaacctccctatacaattttttgaaacttcctgtgaacttgtagtttatcaaattaaaaagaaaaattcaaacagccttagtttagatctttaaagcctgatcctaatgaaattaaattcattttcatcccatgtatataatattgatgctcaccccaatgattcgtagattacatatttttgacaaagaaagaaatgtaataggttgttactttcttttttacttacaataccagtatcattttgctgaatttaattggggagctctatagaatacaacttgaaaaatactagtctaacttatgtcagatgttcaaattaatgtagcttagtttcgtgctctctggacttttagacttcatgattcaactaaatttaaaacaagttagaaacaaaccagagatcaaccttgagttgccattttcttactttgctaattagggcttctcaccattgtaatataaaagaaaaagaccctatcagcaccaaaacttggaaggacctgatcacagaattaaaaaatgaaataattaaaaaaaaatactccagcctcttcatgtgtttcctgtttcaccatggcctgatgtgaccgtcatcatgcactggaacctgaatttaaacgcatgttaatgaactcctcaaatggcatttaccgaatcagagaaaacttgaaagaaacttaactagcagtggtccatttgagtaaaaatataatacataaaaggaagatctcttgaattccaagcctgacaaaaatttcatctttattagatggaatactatatatcccattttaagaggtatgcatatgtacataaatcggaaatttgcaagtaatatatgtgattttaatgaacttcaaagaaaacaatcatacaattgtatagtcacaccacatatatatgattgtagtgttagtaatagtgttttctgagtgcaaatgatatgtatatgtacgtaaacatacacagagatgcatgcatatatggaatatatgtgtatgcaagtacatgtcatatgctttcccatgggcaaatgattatgccaatattttcccaattttctaggatgttaacactcagtctcttttgctcaattccatatttaattttagtcctgttgaatcattaggatgtctttcatttagtccaagtcttactaatctgagttccatagtccatcacaatcccactttttctttggaacacttcctaaatagcaaattgccaatgttaagctcccttcttctgaccttctctagcattaattacacgtacctcaggtgttgacacataattatggtatgtctcagcttgtcccagaaatgatttttagtgatacatgaacatacgctatatacttttttaaatagaaaaataattgctgacatttaaaacggatctgaacttttgcttagtattaattctattcctcacaaaatcccacattttctgcccatttttcagatgagaaaagccaaagttaaaagggcttaaagttcgtgttaactcagctagtcagtggtagagctgagatttatagccaggttttctctttcccatgtgtgactctccaccagtattcattgctaattttatgagcaaatttgtagaagcatgtattcttttgaatgaatataagaatgacatttactaggctgtaccatacactgattcaatcaaaccaactaatttgcacaaaagcttaagtgaaatctctaagatttcatgcagcctgaattttaaatttggcatgagataggagactgccctttgcttagaaaacaaacagcacaacacgacaaagacataaacttgccccaatgccattgtgcgggagagcataaacctgtggtgagtcaaggctatagaaattaggttctgtggcccatctaatttgttgcccatgtcaggggccagcatgctgtccaggatccagctcattgctggcttcctcgctatgaaggcaatagtcttaggatccttgttataaacgtttggaaaaagtttctgaggccctcaaatcttcctggaggaggcagatatacagatatagcacataccaggaatctcagtcatgggctcctcgatggcagatcccatcagtagtgtttgaaacacacagtttgtacatcataagccccaaattttgatggctagtactaaaaattattttcaaagttgtatttcagtatttacataactattgagaagtgatttcttttgagagactcaaacaacagaaccttattttagctaatgaatttgtacatgcaattccctaattttcatctccctggcagaatggtttctacactccaccttatcctatagactaattacaaattaaccttactaaatattcatttttttctcacttcttcctttgctcacaaatttctagcatgtgccttacatgcatgcattctagttcagactaagactctgacctttcatgccaccttggatcccaccttatttctcaatattctcaacatgaattttctaaatattttcagcttagacctttaaatctatcaagttataattagtgctgacttggtagtggctaatatcactgtaatacataaagtataatgaagaaaatatgtgtttaagaaatatgaacagtagaattctctaggatttaccatcaaactacctgtgtgacctagagctaattatataaatcctgagcttccattttttccagtaatagggagatgacattagatgattcttaacatactctttaatatctttgacaaaaaaaacttcagttatctgattgcttatcctacttgtgtttgttttgtattctcttatgtatgctgggaaatgtgaatccgtatacaatcactgaattatcataatgagattcatctcctggcactggtgctaagattgagaatttttgctattgatggacagagctgtggtattgtgaggcaatatttcttattatattgcttttgttgaagttagtaagtagtataatcctgaaagcaaaataaaatgtggagccaaacaaattgcctctcatatttacagagggcaggccatgcatattacttcacattatgcataactgaggttgtaaaatactgctgtagtgttttgatgattcaacagttagtgttcttcctcaatcaaagagctgatgttaacagaacttgccacaatacagcatatgctaattgcgtatggcttcatgtgggcccttcaaatataaaaagtcaaacttttagaaaccactcaataccagacattcaaaattctgggtggcagtaagggatatcatttgatatttgaagtcaagaaccggattagattagttagagatgcaggaatatttgcaaggtctgtatgacctttacataacatgatctactggaaacctgtttttctaaatgtttatatgtatgcacattgacatttaaaatgaaaacaatgggatgtaaatcctctcattaagatgggtgccactgactgattactattcttgaagcaatgttgtcctttttcttgcatggtaaatgcttcttttttaaaaaataaaaaagtcattgctatgtataaaatgcatcattcagagattataaccagggttggaagtatcatatttgaactttagcttagacaagtccagaacatgttacaacagggtcactgtttgatgttacattgttgttcagagctcaactgtgtgttaggcctggactgaggacacagtgacaccctttattgctgtattgcacagttacatctcagggtaatgcttagaggtgggatatgctaatatagtagtctaaaatgtgcaatcaataattcaataattatttagggagggtcagataccacgctatgtgttggaaatacagtggtaaacaagactatttttaccctcatggtgattaaaatccactgtttttttttaaattattttaggatttgtcaatattccaagggcctaccgcaaggaagagcaagtgactaaagcttgtttctaatctttctctttttattcactatttttacctttcattttgtctcacagacatgatttgacccagtaatgtctcaattctttcccagaacaatgtggagataaccagatcataaacagctccacctctaattacaatctgcgtcattttcttgtgtgtgtgtgttttttttttttttcattttgatgtcattaccatagggaggaatcccacaatggggcaacaatcaccatcagttcctccacaacatgtggtttcaaccatgactcttgagaaagactttagctctatctcagaatattcccaataatttgatttacttaaactttatggtgcaaataatgtaacccatttcacgattctatctgctttattcttctttcgtcctttttgttctttaacatgtgactgaattataaactgccccttgaattcatatcagtcacaaaataaccttgataattacttcactctacatggatttctctataaatacatttcctctctgatcaataccaaccaactcaacatcgtccaagttctccccaaatccaatgaactcttccttctttgaatttagaacacaaattctatctcatgtatatgcatataagatgtcattggaaaaatgggggaaaagatcttaaagggatcagggaggctgggtatggaggctcacgcctgtaatcccagcactttgggagactgaggcaggcggatcacctgaggtcaggagtttgagaccagcctggccaacatggtgaaaccctgtctctactaaaaatacaaaaattagtcaggcgtggtggtgggcacctgtaatcccagctactagggaggctgaggcaggagaatcgcttgaacccaggaggcagaggttgcagtgagctgagattgcattactgcactccagcctgggcaacagagtgagactctgtctcaaaaaaaataaaaatgaaaaagaacacacatttgctttgccactcacatggtcactattcatgttttaacttaaatcattgaatggtcttattgtgttttcttttttttggtttttttttttttggttttttttttgagacagagtctcgctttgtcgcccaggctggagtgtggtggcactatctcggctcaccacaacctccgcctctggggttcaagcaattctcctgcctcagcctcccaagtagctgggattacaggcacccgccacacacccggctaatttttatatttttagtagagacgaggtttcaccatgttggccaggctggtctgaaactcctgacctcaggtgatctgcctgccttggcctcccaaagtgctggaattacaggcatgagccaccgcgcccagccttgtgttttcatatctaatgtttcatcacatggaatgcagtgttcagagtggagattctaggatagacagatagataattgctaacagtgcttaaaaaatattcagcatttgataaatatttgcttttttttttttagttttaggtaaaattaaggatcattaattttttacacctttgatcatgttaacatataaaagattaaataataggcaataagtagcaataaaataggaagtttagtttttccaaaaagtttatgatacttttattatttaaaaagaaatatataaaataatcacttggacactatgaaaatgttggaactgtaacttagcaattagaaatgcattagatacaaatgctatacagttactttatattcaataaatgttcattgatagtaattgctaattttaagatcttcgagaaaatagatacaatattgccacaaataacacctttttaaatacaccttggaatatcagggttataaatagttctttgtttggatgacaaaagtcttttttctttagccacagctgttgataatataaataattcatttttaaagcaataaaaataaatacagccaagattatattcatttatgtttgggggccatatatatagtttatagcataaaaaagcagtgatcttatgttgaccctttctctaaaaattaatagtttattcagcttcctgtgttgaaattgtttttgtttatatactattcccttatattttgcttatatttgctctctttttctgaagaccaattattgaccataaaattagataatcttggaaggtgttaacatttcctagttgaggacgtgtgcaacgggatggattttgctgccgtctagtttcttctcaagtgtctaagctgaggcgttccctactaaaactcaccactgtctggaaatcaaggcacttaactctctgttgtgagggggttgattgtaaatgtcccaaggtattgcaaaagcagaaggacccacgtagagccatgcaaatgagagtgggtagatacattttatgagtgggtgcctcctattctcagccctggtgatttttagggtggtctcaggtgtgtctcagggtagagaggtatagagttgccattctttgtctgatttttttttttccttgtctattgctttaggataaactcagccttactttactcacagctacaattttggctctcaaaagatagtttgggaaaatgttttaaaaatctgactatttattgtttcttgatgttttcaacccttatacaataattttcttttccttgaatacccattgatgatatatgaaaaaaataaggaccagaaggtgaagtgggaattttaaaagtatcaagataaaaacataagcgttatctcactagagacataaacccaaatattgtgttgatcagggtagagtaaagaaagcattgcccctgttaaatcacttatagctacgatccacttggtaatcattataaatctgtgattatatatatatacatatatataagctccatatgattttatttattatgaccttttattttacgtatatattagactctgaagagccccagggtatttgtcccaagatctttgcaaaactccgaatttgcaaacatcactaaggcatataattctactcataaaatgcagtaaagtatggctaattacagagaccccatcagactcttgatgattgtataaacttaagtcatatataacactattaaaataaaatctactactaaacaaaccacattgtattatatcaccccaattaaatttttaactatgaacttgcctcaatctgaaaataattgtagtgagcgaataatgatacttgctgtgtaataggtgcctggcatgttttctttaaagtaggacacttttatttttaatttcaacttttattttacatacagggagtacacatgcagatttgttaaaacggtatattgcacccagatagtaagcatagtacccaataggtagcttttaactccttccccgccggtccctccccactctagtagtccacagtgtctgttgttctcatgtttatgtccgttgtgctcaatgtttagttcccatttataagtgagagcatgtggcatttggttttctgttcttgcattacttcgcttaatataatgtcctccagctccatccatgtcgctgcaaaggacatgattttgttcttttttatggctgcataggattccgtggtgtgtatgtactacattttctttatccagtcaaccattgatgagcttttaggttgattcgatatttttgctattgtgaattgtgtgacaaagaacataccagtgcatgtgtctttttgataaaatgatctattttcctttgggtatatactcagtaatgggattgctgaattgaatgatagatctgttttaagttctgtgagaaatctccaaactgcttgccacgggggctgaaataatttacattccaaccaacagtgtataagcactcccttttatctacagcctcaccagcgtttatcttttgattttttttttttttttttttttgtcacccaggctggagtgcaatggggcaatcctggctcactgcacctcaacctcctgggttcaaatgattctcatgctgcagcctccctagcagctgggattacagatgtgtaccaccacacccagctaatttttgtatttttactagagtcggggtttcaccattttggccagtctggtcttgaactcctggcctcatatgatcctcctgcctaagcctcctacagtgctgggattacaggcgcaagccactgcactcagcctttcttgacttttaaataatagccattctgtttggtgtgagatggtatctcattgtggttttgcttttcatttctctgatgattaatgatgatgagcatttcttcgtatgtttgttggtcgcttgcatgtcttcctttgagaagtgtttgttcatgtcttttgtccattttttaatattagacttttgtcaggtgcacagtttgtgaatattttctcccattctgtagattatctgtttactttgttgatagtttctttggctgtgcagaagctctttagtttaattaggtccctcttgtcaatttttatttttgttacaattacttttggggacttagccaaaaattctttgccggccgggcgcagtgcctcatgcctgtaatcccagcactttgggagaccaaggtgggtggattacccgaagccaggagttcgaaagcagcctgaccaacgtggcaaaaccctgtctctaccaaaaatacaaaaattagccgggtgtggtggcagacgcctgtaatcccagctacttgggaggctgaggcaggagaactgtttgaccccaggaggcagaggttgcaatgagtccagatcacaccactgtactccagcctgggcgacagagtgagactctgtcaaaaaaaaaaaaaaaattgccaatgccaatgtcaagaaggacatttcctaggtttgtttctaggatttgtagttttaggtcttacattaatatctttaatccaccatgagtttatttttgtatatggcaaaaggtagggatcaagtttcattcttctgcatatggctagccagtgatcctggcatcatttattgaataggaagtccttttaccattgcttgtttttgccagccttgtcgaaggctggttgaaggtgtatggctttatttctgtgttttctattctgttccattggtctatatgtctgtttctgtaccaatattatgctgtattggctactgtagtcttgtagcatagttggaagttctatagtgtgatgtactgtggtgtgaattattgtagggtgaagtactgtagtgtgatgcctccaattttgttcttgctgcttaggatggcttcggctatatgcgctcttttatttttttttttggttgcatatgaattttagaattgttttttctaattctgtgaggaatgaccttggtagtttgataaggacagcattgaatctataagttgttttgtgcagtatagccattttaattatattgtttcttccaatgagcatggaatgctttttcgtttatctgtgtttctttcaacaatgttttttaatactccttacagagatctttcagcatcttggttaggtgtattcctaggtatttcattttctttggctattgtaaatgggattgtgttcttcatttgactctcagcttggtcattattgttgtatagaaatgctattaatttttatatgttttactataaaaatatatttttatgtattgtatatcttgaaacctcgttaaaattgtttatcagttctagtagccttttggtggagtctttgggttttctaagtatagaatcataccgtcagtgaaaaaagatagtttgacttctttttctatttggatgcattttatttctttctcttgcctaattgctgtggctaggacttccagtactatgtttaataaaactggtgagagtgggcatccttgttttgttccagttctcagtgggaatcgttccaacttttgcccattcggtatgatgttggctatggatttgtcatagatggttcttattattttgaggtatgttccttcagtgcctagtctgttgagggtttttatcatgaagggatgttggattttattgaaaacttttttctgcattaaaataggacactttctgtctatgcttagcgtcttgtttattcttatctactttttacttgatgagatgtttcttcgcaattaaaaatatttaagtgacagtatagccacccatactttttattacagaaataaaaaatgcttcgtctctcatctgtcatttgatgaaaaaatccaagactttcttctaaaacctgcaaacatcataattcatatttgtattgcctccaactatcttctttcaagttaaccaccctttcaactttcactaaatctttaactcctatttgacgaggtattgaacgctgtactcaatgaaacacttttgcagcttctcttttggttatttatttttctttggttttctatagagaacataatggggttgaataattcaaaaatacaaactcttgctgatttcaacattgcacttttaattatattaaacttgtacttcctgggtcaaaaatcatctacgttgtaagactctttactttttctacctttttattgccagccttgtcagctatctttagggtagaagaagtgggagagatggtaaagcaatgagttgtgatttatttttctcaaaagaggaaagtttgcttcaaatcaaggaaatcaatacctacataaaaataaggggaggccaaggctgatttaataaagagaaagctagagtttcatcttgaatctctcactagcatagcgacttatgtatgaacctcagtaaatatcaatattctagacatagtggggcttcggtgtttctcaggaatagtcagacacatcagtatttaatctataatttaataaatccaagggtcttcttatctggaataaagctgactaaataatttagttgcttataaagcactaatatttagtactaaaatgacctgtcaatgttatttacatttattttatgttaactgaaagctatgttgctgataaagcttatattaagttcaggagttttaacgtggaattctattaatatggactcttaggactcaaagtgtttttcattaaatatcctggaacgtatgatataaaaattgagagatttatctttacgtattttgttctgcccatattggtattttcagcttattttctatcacagatttacatgggccaagactgaatcatagaatgggatattggaatttaatatagtttgttgatgctatggaatcattttttaaattatcaataacttattggatcttttattgccaaagtttcctaggatttcaattgaaatgcaaaaagaagaagtaaaagacattaacgtaaattctcagcagtttatacaaataaatttacaaggggcctatggaacaatacatgttggttttattttcaattgtagcaaaaaaataaataaataaaaggtagtttgccaacctctagagtgttgtaataatggcatcttttgacttttggagatttcatggaaattcttcaggtttccaacaagagccctccgggtgtgttgaattcatctgtacctgtgacagtcaggatctaggcaaaattcagaaaaacagtgagtacactaaatatagacttgccaagtctacagttctttagggaaaaaaaaattcctggactcagcctaaagtccccctaagttttagaggtcagtaatatttcaagtgactagaaaatctgaactaggtacatcatctttgttctcacacttagtatgattgttctcaccaagcatcattgcttttctcctttctgcataatttttccttactccttgattgccctttcactcttatgtgaccataaacctctgagtttccataatgtagacatgaaatttaatggactacattatgaaaatatttttttcaatgtcatcataatttctgtgccaggataacaagctcagaatatgggagtttatagtccagcatctctcccacaacctactatgactgtaaagaaattgtaacctgctccttatttccttcaatgctaatttctttgaaaattgattatgaatgccctccaatcaatatatgtaaaaaaaaaacctttatctttactaaaatacatatcctccagattcataacgaaggagaaaattctttggggaaagaagagtggagacccctcagtttcaattctgatccaactgactttattttgtccctagggttattttgctggttggtggcttaacattctaatcctagggtaaactaggacctgccttgccccttaacaacatgtgtaatcttaaatctggcccagtcaaaagttttaaacaagactttaggcggtaaaaactgaaagagaaataaaccaggaattaacaatgaactgataatttttgctgatgaactaccacttggcttacagagattagaacacatctttctaatcttatgacacaccaccctaggctgagagtcattctagcaccatcttcgtcacctactcccttgaaaggtacatgaagttttatttcctttcaaaattttatttttttatttttggtttcttgtttttagaattattatctggcaaggataggactttatccatggactcgacagtgcatttattttagaaaaggcgtgtatatttgtgcaatttatcctagcagagtaagttccaatatgtatatacaggccaaacaatgactataatatgtacatttttcttcattaactgtgttgattgcctgtgttctttcatccagcagaggcaaagtactaacatagaagactatccaaagtcttccagtagacttgtttagactagatttgaaagaagatcttaagtgtaagattatttttatactgttttcaacttgtatatttgtgcaatttgttgaacaaatgagaattagataaataattttaaaatataagtactttatgagtcagtttcccttttttgtaagttctgtttcccagacgtgcaaagcaatataattcttattatttcagggtataaattaaatttaacctgagcaaacaacttcttgtatgattgtattactatttttattactattatttttagagagactgatgacattctatcacttggtgtcatattcatctttttatagatatttgactaataatatgtaataatagtattatgaatggtgcccttaagtctgatgatttgcttaaggggctaaagaacaatatataaatggaaatctaaatagcactacttttaaaaagaataaacccatagaaagaaaattccatagctcaaaactaagaaactcaaaatccatataacacagaaagtaaaagggagcagttttctatatatatatatatatattttttaaaaagctctctgactctggttaaggatgcttgtgaatctaaaatgatgcatgttgataaagcactgtaatttaaagaagtctccagtcttgcctttaacagcaaaagcaagaacacattaaatatataggatctataagagaaatgaataaaaaatgttcaaatggaaatggtaaacatacagactagttcttaaagataggtcatgtatattcattttctaatttaaattgagctattttgatacatgtatatattttattattatgaaatatgtcaaacaactggaggatgactaaaaataatattaatataacattttgccgtacttgattttagaatggtggtaccaatttatgcctccaacagtagtgtatgcatcccccatttttcaaattcttatcaactagatattgacactttataatttttatcaatttgatgagtatgaaattatatctcatttgttttttgatcaatgtatcttttatattcattgaccctttattatttcctgctctgaatcatctgttcatgtcctttgccaatttttcaattgacttttggtctatttcttattttcatgtaattctttaggtattacagtttttccctttcactcatcggtctctaaataaacttggaaataatttttaggggtttttttgtgaatagtgaataattttgtgaattattttagagtaaataactgtcctaccatcattgtttaaatgtctaccttttctctattcacctgtagtgtcacctctgttttgcatcgagattagtatatacatgtacattagattagtatgtacattagtatttctgggcatctttttttgttctgttcttcatttgccaattcctgtgccagtactataatatgtctcaattaccatagatttatatttagccctgacatgtggtagggccagacaccctaacttgtttttcttcaaaactttcttagataaaccttgccctttgtctatcatcagttctataaaattatcagccattatctttaaatctggcttctctgcaattccattcattctcttctttaggaactcttattgtcgtataatattgtccatcttttatgtccttagtattttatttttaacatttacttgcctccctgtgttacgttctggatgaattcttcattagtatcttctaattcactaattttatcttcttgttcaatccagatacttaagctgtttatttctttaaaattgattcatttactacatttttcatttccaacatttatagcttttttcttctcaatatgaaattattttaatttctacatgcttttgttttataactacttgttctttttattgagttttatcttttaattttattgttgagaattctaaacatattatttaaaaatgttcttcagacatctatatgagaataatttcatctagactgaactcatggttgaatcattgtggttgtggtggtggtggtggtggtggtggtggtggttttctgccttttttaggcctttatttattcacagatttctggagcatttagagtaaaagggtttgcttttattgtcattgtgtttattatatctgttccaccactttgctgttgtccccatctggcccctggaatagctgcctagattcagatagtctactaccacgtggagtgctgtttgtggtgataattaattagaaatattgaagattcagtactcaaattcatttgttttgggctgcttctgccttcatggcgtgtgtgtgtgtgtgtgtgtgtgtgtgtgtgtgtgtgtgttcttcccgtatctctagtgtaacagattcctaacataataggctctcaggcagcaggtcagcaaaatttttaagacatttttcttttcaagaatgattgctgggtgaacttttgccataacttgtgacttcaagcagtgatcttaattctagtttatcctgtacatgtggactcttagtgaaggaatctaaatgcgaagccactacccatggggggaaaatagtctgtcaggactgcagctactgtgtctgatatgtggaggtgccaagattgtgtctaagtcctactgtgttataacactctttctttttttatattttctttcttattcttctatatattaaataagtgtcaagtcatgaaatttccatgccatcttaactgaagaggtttaaatgttttatatttaatctcccgttatttattgactttacaatgtcaaattaaaactcacattcaggcatatactactaaaatactaatagaagacaaactaggatcattatgtttagggaaaaatacacacatactatcatgacacagtacaattaacataaaaccaaacaccagaggtttctcttattaaagctgaattttaattgtttttatgtatctatattactgtctataatacaggttcttgagaattaggactgctgttgtgtgtgtaagtgtggatcgcttttgttgtaatttttgatcatacttctggaaactagcatgatagctggaaaacaggtccacaaatattaattgaatcaatgactgtttaggagacacacaggcatagatgcagcttctgtactacagtaccttacaacctatcatcgacaaaatacaaaggcaataagtactttttaaaaatatataattgtataaagtgatgagcaagaaaacagaatgaataagaatgtgtaatagtaaattaatcccatttcacttttgataggcttttatataaagctgatacaaaatactttttaaattctcagtgaggcatttgatgagtttcctaataatatttatgtaaatataatagcaagtatacaatcttctctatattttgtaacagtaatgactatccctttaaaaggtatctatttgattcagaggttattatttttctcttgtcttcgctaattttaattctctgatgatgttttgagaacacatcacttgaagatttttagtagggcagtgctgttgtctatgttactgaaaagtaactggactggagaatgtgaacatgcactcctgttcagtatttggattttaggagtgtgtcgctgattcttgaagaatttttttaaaatctttttaagaaagcatcattattgttacttaaaaatatttacctgttaagcacctcttagaatggccaaaatccaaaacactgacaacatcaaatgctgaccaggttatgtaacaacaaaatctctttcattgctggtgggaatgcaaaagggtacagcctctttggaaaacaatttggcagtttctcacaaaactaaacacacacttatcatatgatctagcaattgtactccttggtatttacccagataagcttaaaacatatccacacaaaaacctgagtgcaaatatttataattattcataattgaccaaacttgtaaacaatcaagctctccttccataggtgagtgaatgaatgaatgaacaggtacatgcagccaatagaatattattcaggacctttgaaatgagctataaagccatgaaaaaagaccaacaaatatgggggaactgtaagtgcatattactaagtgaaagaagctaatttgaaagggttacatactgttgaatttcgactatgtggcattctagaaatggcaaaactatgatcacagtaaacagatgagtggtttcagtggttgccaggggttgcggcaggaggtggaatgtatagacagattacagaagatctttaaggcagtgattatatattatccgaaatgcttgcgaccagaagtgtttcagatttcctttttttttttggggggggggggcgattttgaaatatttacattacacttaccagttgagcatcccaaatctgaaaatttgaaatccaaaatgctccaatgagcatttgctttggacatcttatcagcacttcaaaagttttgaattttggagcatttgaattttagatttttagatttgagatgttcaacctgtatgattctatagtggtggacacatcgttgaatacttgcccaaacctatagcatgtacaacactgagtgaaacctaatgtaatctatggactttggctgacattgtatcaatgtaggctcatcaattgtaacataccattgtggtatgaagttttgatggtgggggaagctgtatgttcgtagggctagatggtatatgagaaacctctcttccttccacttagtcctgctgtgaacgtaaaactcctctaaaaaacaaagtctatttttaaaaaaacatttactaggacaaaacatgtttttagcacaattttttaaacgcacagtaaagcgccatatgctcatgagcttcctttggaagcgcccatcttcaaacaagtatattaagataagttttgtccatatcatagcaggtattttattttcccattctgcatatatttaacatggtaattaattcagcctggtattactctggctgttattcaaagcctcatatatgtttgctaatttgtcacttgctcctcatacaacatcttaactatttaataagcagttaccaaagtctagacagtcctgctccagcatgagttttaattgagtatgtactacataagacaattaagatccgaacaaaccatcagcggcagatgatcctacagttatgaggaaagcttctgtaggagtgactgtgtaaaatgatgaaagcaaagggtcttggaatatcatatatatttatatcagggctctaaagacatactaggataaagtggagaaaggcatctctagggctatcttctgtcattttgttgccagtcgttttaccatcaaagcaatatttttagaaaaaggtttccatcatcatttaccaatattttagggaatctttaaagtctaagaacaaatcagaaggtaataataatattgaaaaattattccaaaatgtttagtacgttgtttgtcttgtttcatcaaaactatttgtagtagcagaacttttgttggtggttctgtaactgatgattagctttcagtgcaagtatttttcaggtaactgtgtgaaaatatttttaaacatttacactatgtttccaaaccggaacactttggtatagttatacctgtgaaataaatgacattgtgtaaaacaatatagcggatcttttaaagtgagttgacaggatgacagtacagttactcacagttcaaactaccacaatatagaatgtaatgagccataatgctattatttttcacttcagaattttaatattgtgttttgtacagttcttaaaatgtcatgcataaaacattgtgctgaaacaatagtgatttgtatatttattacgtcagtaggacccaacagtctaataacgataggaaacaatggaaatttttcctcagacttttttggaaactggttacacaaagaattgctttgggaaggatctaatgtttgaaaagcattctggcttgatctttagatacaacagtttgatcttttgtgcaactgagagcctctatataaatgcagctggagtgagtagggtatttgaggctatggcaccttcagtgatagggtgatttttgtcttactcatcctcagtgccaaccagaaaataattacattcctctaatagtgaattgaccactaactaaatctgaaggacaagaagcttggaaaaatataactgtgcaaaatggcttatcgaacttaccattttatagaagttgaacatggatctctaataccttggacttgcttctaatatggtatcacatagtttcatcaccgtgattactaatggatggagtgatatattttatttccaagtattaataaaacagcaaattatcataattgaataagaaggatgctacattgcatatttaataacgtatatgtgacactggacaagtaaggatgaattaatctcttggaataaaccaccattgaaagagcgtttctgtcaagtaatgtcatttactctccttattaacaaacagagcaattctgttggatcacttagcatggtgagcttattaggaaaatcacattggtttcagcaaaagactcatgtgacctttctaaatgaaaatagcatgatgctaaaaaaaattggagggaggaccatctctacatacagaatggtctttgcaatcaactaccatattgagaaaaaacttttattttttatgtttagaatatagaagggtttctgtttctcttttaattaaaaggaacgaaagtggtatttacattaaatgcaaatagcaccttctttcctacagtgagtgtttctcagaaatggacacattttcccttctcggtctccagaaaccccttgatcacaccaaaagagcaagtatggctttctgaaaatagaaaaattgtaggtaggttatacttacagtccctgaatttttgcacatatcgtaaaatggtgactagaattgttcaagatgtgttactccgttacacgtttacaaaggggctgaagagatatagatgttgcattttattaatactaaagaagaaactcagttataggaagtaacaggaaaaatgaatagtggtctgcatagtaacaatatcataatactgtaaagaagaaacattgcacttgccatttaataattgagaaaatctagagtgaattattttgagtaagatacacttactattaattttttctaaaatgtatttctctaactacatgttagttcaggtgaaacaaaaaatgagaatttaataaatgtttatatctgaaatataaaattaatatgtaaatataccttcttttgagatgacaggtgtacattctcggttgaaaagtaggtttctattttaaatcaagattaatgtatagtttatgattaatttaaaatataaatgttatatttcctctcatcctagaacagaataaaaagattttgaaggatttgtattaatcaaataagctagaagccacgcttttctaggaaaaatattaagagaaatgtaaccatgcttgacgctaggatggtgttaccatcaaactaaagcataatttcctctttctgtgactgttgaatactaatttttaaacattaggaattgtctattatactttattatatcatgactactcaatgttttgacatgaaattgtccctaatatatttgctaatatttgaaactagttcaaaattatctggcaagaaatttgtggctttatccatatgatgtatagcatgctagcttgtctatgcagaaggacaataattagacaattcagagaaggtgataatatttatagcttattatagaaatatatgtaaagactttcttgattgtaaacataaatattataaagtataactgagcttttgagattatcaggaaaccaaagtatctacaaaatctaaactttcactcaaacccatggtcagactgtcaatactaaattgaaaaattagactcctacacaagttgtgaagtttttctttcttcatgcatatgattacagaaaggcaggtatggatggcctaatttgtggaataaatccaaccacttttgtaacagctcagataacaaaaatcactaatagagaatgtgatattttatcaaattggctttgtttttgtttttattgtagcattgcataagatcaaagaagaaaataaatgattcaattaaaggaaaaatactgaaaggcaggacacagaaaaagagagttttagatgtggaattcttttgagagatcatctagtctgtttacagatatgaaatctggggaaacacagaggtgaattgtccaaggctttgcagttattgaagcatcaaaatcatacatatatcctgcttctaaacctccctctcagtgttcttttcatctatggttttaaaataatcaagtggtatttgttaagaagttagaattttaagatatggattatataaatccgatttatatggtcaagtttgactaatattagtaaatttgattgttagcaacataaacatttctggagtacctttcctataaaatacggatgacaatctcctttagcattgttattccgtctgggataaaaagcacttcccacatttatttagaaatgtaatggatgtgttcatttaactccaatgatataataattctctattgactacattcagtataacagtgatgtttatttggaattccccttggacttccacttagatttgttaaatatgaggtgatttgaatgacttaactaatgacatttgctcaatgtcttaagtttttcttgatagttggtaaatatctgttcatgatcaagagtgttacaccaagaatttactttcaatagagtgccatagatatcacttactgtgcattctctgtgtttatgtgtaaacatataatagatattcaaaagtaatataacctctccacattataaaataatgcacaaatataaagaaggataatatataagaaaataaaatggtgtaattgcacacgtgaggtgttctattttatgtcaaactatttcttaaaatcattcaaatatcttttaggttactaaaggagcttttgtcatatgaaaatcatatgaatagaccatcacattttgcaataagaagaaaaaaaaatttaactcatgaaatcaaaacctttatccaaaaccacctttgttcctcaatcttgtccaaattttgggtttttctaaacaagttttaataactcttattattttatatatttaccaaagcaatcagtctgtataagatttacattttagcatgctgttttttctctgatttatttctttcgaatcatcacatcaaataataaatcttaaagttgtcaattaaaattgatttcaaatgttttgtatctccccactattataagaactatattgtgaagtctatatcaaaatatagggggaaaagcctaaggtcgcaagtgaaaattttttttctaagacacattcaaaaatttgctaaccatttttgcatatctctaatttgccccagaccccaaattttaggataatgataaacttttagaatttgttaatacaatttttataattgaatatatcatatcttttttcaagtctatgttttttaataaacctgagagcaaatatttaaaatctcttttaaaagcatccaaatcgtaacaaaaagaactgtacagtgtaaacaatagtgtatgctccagacaaacaaagccttgtgatgtgaaataaagcaaatttgtgtataattaagcattaccagtactgttaaaatataggtttataaactggcaagaatatcgggaacatattctcagatattcaaatgcaaaaatggaaaatatttcatttttaacggtgaaattttctgctaactgtttacaaaataatatgtacttatatatagaaatgagtataagctattttcttttaatggctagtttctcattaaagggatcatgacattaggcatattaagagtttagtttggaaactattttaaaatattaataaagagctattgctaattaatgatgggattttccagttttatacatgaataaattactattaaaataacaaaaattgataactaagaatggggattagagtttgaaaaatttcattagtatttatggatttattggtttccctcattagagactagatgaccatcagagacggtgatatttttacttcataaccgcttatacctgttgtaaaatatcgagaggccatcagaattttgtcacttagagaagggactggaaatttttttaggtattcttttgccaagcatacttgctctatttaatggatgagaagtaaagctagacagattttcttcagttaaactttcaatatctccacagtctacagtacattaaaattcactcattgaaatttttttgtttgactctataatgataaatgtatctatttttagcattaataaaatggatgaagctttaactctataataaattcttccactttaaattctatacagcttgtctttccctgattctctagttctattaaattagtagaagtagttcgtgtcttcataatcaattgttatcaagaactaatatgtctaaataaacctgtagataaatgtccattcattattcttggtccataccaaagttccaattattatttgcagtatgtacctgacatatacatactaaaatgggttcaagtatagtttctcaataggaggtggatccttttattgatacataatagttgtacatattttgaggtcacataagattttgctgtgtttatgtaatgtataatgatcaaatcaggataattgggatactcatcacctcaaacccttaggagatggatactctcttgatgttcgatatttttagttttactttgattttatttttgtcatggcctcatttcaaactgactcataatccagaattatccaactaaatcataacagaaagtattattggctaaagtgaatcaagaaaaaatttagcattgttgctgtcatatacaaacatgtaagaagtttctttcacattttaaatataaatataaatgactgattctgggtttttcccttatgaggaaatacctaagcaacattaagctaagcaaataaatggttatttgtgtgatgatcttctaaatgtgtgtgtatgtatatattgctttaataaaaatttcagatggtatatcattttttaagtagcgaaattatcatagtgacttgtgaatagcaaaatgcaaaccaatgtggcattggatcctctccaggatgtgatgagtcacctgtcaccccccccattcaaccccaaatcccctacattctcagggaggactagttcttcctaaggctaacatgaatgccacatgttttaaagcaaagaatgtagaacatcaagttttaaatgtcatgtccattaatgagattagttaactgtccctttgcaagttcaaggaacaaagaaagccctgtggagagcagagagaagacagataggtggctgttaatgataagaggcaaaatttggtaaagggaaggcaacttaagctaaaggaagtgagtgaggtggatagaccccactaaaagacaaaaggagatagtacttaagaaaaaaatctgtcagtatctctctctggtagctgccttgtttttgttttgttttatttttgtttgttttatgctttcctgtaaatcatctcaaaatatctgactgtagcttcctctttcactcatttcattctgtaaattgtttctcaataccatgcctcttgaacacgagaaaacgctgtttctagcttcatcttcaagatatttatttccatttgtaaaaagaaagctgaaacatttttataggctacctcagagattatatactaacattttagtaacatgttctaaatgcttgagtagtttaagtattgacataaaattgctttctatttcagttggaattgtttgaatcctcagtaaatgtaaactattgtagctctaagggtatccccaactagaaagttcttatttcacacattaacatttgctgctttcttcacaagttaaactaaacatattttccttatttatttatttcactggaattcctttaagacattattttctcaagatgtggcccacaagccacctgcactgccaaccacaggttttctcagttggtatctctggggagaagaatcccttgatagtataaaaaatatccaatataccattatattaaaaaactagattggtcatatatctactgcatataacactgatggtcatatatctattgcatgtaacactatatacctgaataccagataaatgtagctcgggaaaaaaggtgaattatttcatgtagcaaggagtgcagaggtagcttttctgtcattggtttaggcatctcaatttcactccattccaggcagtccctggcagaaaaagaacaggatcaacatgattagcctggccaatcatgatttgttctttgggatgagtacattgcttgtgcacagtctcccttgatacccgaatggaattggagttctgttgacaaagaggaggaaactggatgggcaggtctagagtttatctggaatttgaattgtgcatttttagacatagagaaagaaatgcatttttagacatagacaaagaaataagtaggttttattatagtacgcactaacttaggtcagtttctatgtttctgtgactttcttaatcttacataattacctttatcttattaattaattaatttttatttttgctacatgaataaatacattcaagagggcacacaataaaatatagtaatatataattccaaagtacgggctcagcaagtagaaaaaataaacaccatgatttgaaagcattgatgtaaaacttgatctttaccattgctaattagtcagccagaaaatatatataggaaatggcttagccctacatataaaatgtgattctcattcttagggttatctatgcatcttttatctggtactactttttatatctcaatatttgacatcttttttgccccatttcaaaatataaatttatttattttctttacaactgcattcctctgcacaaataaaaaatatataatttagaatatatagtagagttttgataattatatttatattttaaatggttttgatatgaatagttacttctattctccacctgtttaacaaatttgatatttggaggcaaatttccatatatttgaataaatatgatagttaagaaagcattactttctatttgccaaaacttaccttgaattaaaaatagacaatacgtatttatatatgtgtttgtatatatgtatatatgtttgtgatttgtaatggttttgtatatgtgtgtcttctaatacaagggtccccaacccctgggccaaggaccggtactggtctgtggcctgttaggaacccagctgcacagcaggaggtgagcagaaggtgagcaaacattactgcctgagctctgcctcctgtcatatcagtggcagcattagattctcataggagagccaaccctactgtgaactgcgcatgtgagggaaataagttgcaggctccttatatgaatctaatgcctaatgagctgaggtggaacagtttcaaccccaaaccacaacccctatacccccagattttcacctcccccaaacccctgtctgtggaataattgtcttccacaaaactgttccctagtgccaaaaaggttggggaccactgttctaatacacacatacacacacatacatacatacaagtgtacattgatatatatatatatatatatatatataatgaatagtttactactatgtgggctattatacagaactgaaaaaagaaccacaacaacacaaaacaatatcgatgaatgttagcagtataatatccaaagaaaaaaataaatccaacattataattcaaaaaacccaatattaaatccaataaatttaataaaaatgtcagatggtgcattctctgagtacagtatcccttgatacctgaatggaacatactacatggtaaatatcatctccataaagccaaacatattgaaaataaaattttagtctttaggaataatatgtgtgtgtttaataaacatataaaaagaaaagaaatgatgaagaaattattcaaaactgtgttacttcatttggggagaggtagggaatgtttgcaaaagtgcaacatgattggacataggttattttcaattccttgcatttttgcaggagtaaggagtgtttgcagctgtttcctacgttgttaaaaatgggcaggccaagagtgcaatgtatctttaacataatgtcgtaagtaatatcccaatcaaatcaaatttatgtaagtatgtcttatgaagtaaatgcaataatgatatggggagcataaatgctacataatttgaatttaaatgagagcaattggccaggcatggtggctcatgcctgtaataccagcactttgggaggccaaggtgggcagatcacctaaggtcaggagttcgagaccagcctggccaacgtggtgaaacccggtctctactgaaaatacaaaaattagccaggtgtggtggcagatgcctgtcatcccagctactagggaggctgaggcaggagaatggcttgaacccaggaggtggaggtcgcaatgagccgagattgtgccattgcactccagcctgggcaacaagagcaaaactccatctcaaaaataaataaataaaaataaataaatttgagcgataataaagggtggttatttgggctttgtatggaaagttacttattttcatacagctttctatacatacaaatttctgtcaataacaagattgaagaaacatagagtaataaatacaaccctctgcattctgcaattttcctaattcaaagttacattttcacatgctgaattgcatttattggctttatgtttaatactaagcttggcacatactatataccaaaaataattttaattttcaaattgttgattttttaagttgttgccaatgatttatctaatttgctcatgattctggatcaatcatttctgggttgtttcagcaaatcgttaagaacatatctaaattagagttatatattattatgtatagctgtatcatttactgaggaattactaacaatacttttcattttctagataaaattcaattgataggataattttctcttcctctggtaattatgccataaataagcatacttctaacatttattcctgtgaaagatggagagtattttttaataactacattcatgaatgtcactttctaattttcagagtttctggtctgtaaaaaaatgacaattagttttactaaaaataaaatgtgagaataaaaatgggtgaaaaaataaaatagagcacacaacatactcctatctgtgaaacttgtttttaaaacaaaaataaaataatgataatttcctcatagaaaaaaatggaaaattaggatttttaggtgaaaaattaaaagttaattttcttagaaaatattatttattctcgcggccaggcgcagtggctcacgcctgtaatcccagcactttgggaggctgaggtgggcggatcatgaggtcaggagatcgagaccatcctggctaacacggtgaaaccacgtctatactaaaaatacaaaaaattagtcaggcgtggtggcgggtgcctgtagtcgcagctactggggaggctgaggcaggagaatggtgtgaacccgggaggcggagcttacagtgagctgagatcgcgccaccgcactccagcctgggccacagagcgaggctccatctcaaaaaaataaataagtaaataaataaataaatacaataaaatattatttattctccattatgagcatgagtcttacagtatggcaatcacttgtatttatacagaatggacataaaaatgaatattttgaataaccaacttaatttgagagtaaattttgatataacttgtcatagttatgtaaattattttagggtagttgataattgtgttctatgaattaaattcaactatcatgcaacccagtcttaatttaccaacataaaaatgcttatagcatttgttagttaataaatatacttcatttgcatctacagctgtgcataaaatcactattcaggatgagtcacatatatttttaaatatctatcacaagtagttagtgcaaataacttaaaacaaaatatattttctgaattagagtctatgagaaattttagccacattaagtagaccaatttgggattaaataacaataacaacaatgataataataatttatccattgaatgatatttacaattggttttatagtagaacaactataagatacaattttcaatacacttctcattcttctaaacatatggagtacagaagttaaatatattctaggaattgtactaacagagtattttatatttcaatctcaaaaattaaaaatatttccccaaagctaaatatgataaattttcaataggcaaattgaatgaacatgtatttgctactaaattttaagaatataagaaacaaaatatataagaaaattcaggttatctgttacattgtaatgcttgtaatggatgtgacggataggattttggttagtttatcaacccctggctgtcttacttaaaggactgattcggaatataaaagtttaactacatgtgatgtgacttgagtattgctcccaagctacctttaactggactcaaggaagaagaaaccatattcaactaaaattgataaaagttcattttcaatgtagaataattcatttatcattcagtgttcttgaagcagtttaaggctttgtttaagtactaaaacagagtttgaagaccgagataattggccgggcatggtggctcatgcccgtaatgccagcactttgggaagctgaggtgggcagatcatgaggtcaggagttcgagaccagcctgacaagcatggtgaagccccgtctctactaaaactacaaaaattagctgggggtggtggtgtgcgcctgtaatcccagctattcaggaggctgaggcaggagagtctcttgaacccggaaggtggacgttgcagtgagctgaggtcgcgccaccacactccagcctgggcaacagagcgagattccatctcaaaaaaacaaaacaaaacaaacaaacaagcaaaaaaaaccaaaaatgaaataatttctctaatttcatttaatgcctgagagaatgattcttatgtataaatttttaaatggctacttatagacattgatacaattatactttattctgttcatcagtgtcctaaattgtcaagtaacagaattcactatctctagggtaaacagtaagggccacactaaagataatatcaaagactcttggggagcagaagaattagaaatggtggcaaagagctaggagcaacattagaaacacaacacagccaggaaggcaacgatatcactggaactgtataaatgaaacaactctgttgccactgttagcttgttgaccctgatgatgctgaggactagatggcagaatggtcaccacagcaaccccagggaggcccaggtgtgttctgcactggccagattagactaaatgctcactgcctcaggctgtttagtactgtatcttaatatcacatcaggacatttgatcagtgaaacaagtttctcagatattccaccttgaaaaagcaggattcataattgagcatctatcaaatgtaatgtacgtatttaaaaacgattaggtcacaaccaatggggatatgtactacatttcattaacatatattgaatactagttcaaatacttctaacattaattcctagagtattaatgtaacatgtcagtatggaaaaaaattccttcatgaaccctgaaattaaagagtctacagtttcagttttgtagtgttcctagttacagaagctagatttttatttttttacaggaaaatacattaggttttgggtacaacatagatcatattgttattcagttttcattctgttcttaatggattacaaaaatatgttcagtttagcaaatttttctttaaaaatgtggaatcatgcaaaactcatcaacaaagttgtaaatttacaagtattacttctatgatacaaagtagagtctactgactatttagaagtagccactgcattcatttaaactgagattctagcacttcatgcaattctgttaaaattcatagttgttttggccagccagttctctagactgaggcccatacttggacttcatcacaaatcattcataacttcagcagaacaagacaacaacacagaatagatctagttcaccttctaaattttccttttattttttggtaagtgaataatggaaaaattataggtttagtgactgattattaacaaagaacataaataaatgcaacatatgtagttttattaatttcatcagttttgactattcagagtgagtgtttctattcactttccaattaactcccagctttttcctaagaatgatatttcgggtagtgatttttctttttttttttttacttttcagagccctgaaaaaatagccattaacagttactttaactatcagtacaatgtataataaactagtcttattgaaatgcattagtttaaaacaatactgaaggagcaaaaatgtctatatttaaaacctcactccagataaacagacttctgttgtaataaaagttaagctagcttattttatgtttaaaaatatggattaaatcatgaacaggaaggaagtcacatatttgaaaatgaaatatacaaatgatgtgcttttttaagtggtagcaggaagaatatgccaaaaagttgtgtttaacccatttctcatgatacacttagaaaagttatttaactcacaaataaatgctgataatttgtttcaaaagcattttatgcatgacttgaagacactagggcttgtcaatatatattaattgtatagcaagttataaaatgaagcttcattgaattctattaggtcacatcaaaatacactcctaccagataaattcttccatttcgttttgtttctatggcatttgggaagctcagctgtgctcaagaaactctgttcctgtaaacaggttagatattaatgtcttctttattagtcttcaagagaagtaaatctgagaccttgcctactcagttaaaaaactacgaatcaaatcaaacaatttattcacaattgaccatttcggggaaaatcaaaccaagcaaaaggatcatttgaaatcaaataactaaacttgcaaactcagagtagaaatagcttgagttgaactcagccttaaaaatatttattttacttttttgttatgtacttgtatttgaccaagctaacctgataccatccttatatagttctgagcaaactggtatagatatccatttacttttttcagattttatcgtaatcatattgttttcggaatcctttaaaattatataaaaagcagcaacactttaattttgctgactttctcacttattaataagatccaacttatataatcagctgtctataccagtggttgacagaagtatggcattttcttcaataaagcaagaattatactggatggggaaaagttgaaagcttttcctctaagatctggcacaagacgaggatactcactgtctccacttctattcaacacagtcctggaagtaattaggcaagaagaataaacaaaaggcatccaaataggaaaaaaagaagttaagttatccctgtgtgccgatgacataatgttatagaacccctatttttatttttaaaaatgttatttgtatatatttaaggaatacaagtgtaattttattttagggcattcatcacctgaataatatgcattgtacacattaagtaatttctcatcatacaaccccctcccatgcctccacccttctgattccccattgtcaatcattccacactctactttcaaatgtacacattattttgctcccacatgtaagtgagaacatgcagtatttgtctttcagtgtctgaattgtttcacttaagataatggcctccggttccatccatgttgttgcaaaagacatgattttattccttttgtggctaaataatgttttattgtgtatatataccacattttcctcatccaatcaacttaagtaaattctatatatttgctattgtgaatagtgctgcagtaaacatatgagtgaggtatctttttaatataattatttcttttcatttgggtagatacccagttgtgagaatactatatcaaatggtagctctatttttaattcttagagaaatctccattctatttttcatagatgtactaatttacattgtcaccaaccgtatttaagcattgtcttttctccatatccttgccaacatgtggagatttttttgtttatttgttttttaataatagccattttgactggtgtaaaaaattccaccaaaaactgttagaaataataaacaaattcagtaaaattgcaggatacaaaatcaacatatcagtagcattcccatagcaatctatctgaaaaagaaatccagacctgaaactataaaaattctagaagataacattggaaaaacccttctagacattggcttaggcaaggatttcatgaccaagaacccaaaagcaaatgcagtaaaaacaaagataaatagctggggcctaatgaaactaaagagcttttgcagggcaaaaggaacagtcagcagagtaaacaaacagacaacacacagagcggtagaaaatcttcacaatctatacatctgacagaggactaatatccagaatctacaatgaacacaaacaaatcagtaagaaggaaacaaacaatcccatcaaaaagtgttctaaggatatgaatagacaattccctaaagaagatctacagatggccaacaaacatatgaaaaaatgctcaacatcactaatgatcagggaaatgcaaatcaaaaccacgatgtgataccaccttactcctgcaagaatggccataatcaaaaaatcaaaaaacggtagatgttggcatggatgtggtgatcagggaacacttctacactgctggtggggatgtagactagtatacaaccgctatggaaaacagtgtggagattccttaaataactaaaagtagaactaccatttgattcagcaatcccactaccagatatctacccagacaaaaataagttattatatgtaaaagatacttgcacacacaagtttacagcaacacaaagcgcaattgcaaaatcgtggaaccaacccaaaggcccatcaatcaacgagtggataaagagaaactgtggtataactgtggccacaaaaaggaagaaattaacagcatttgcagtgacctggatgagattggagactattattctaagtgaagtaactcaggaatggaaaaccaaacatcgtgtgttctcactgatatgtaggagataagctataagaacacaaaggcataagaataatacaatggactttggggacttggggagaagagttgggggaggcaagggataaaagactacaaatacggtgctgtgtatactgcttgggtgatgggtgcaccaaaatctcacaaatcaccactaaagaacttagtcatgcaatcaaataccacctgtaccccaataacttagggaaaataaaaaataaatttttaaaaaatcccatttacaatagctacaaaaaatacttaggaactggccgggcacggtggctcacgcctgtaatcccatcactttgggaggccgaggttggcggatcacctgaggtcaggagtttgaaaccagactgaccaacgtggtgaagccctgtctctactaaaaatacaaaaattagcctaatgtggaggcacacacctgtaatcccagctacctgggtggccgaggcatgagaatcgctggaatccaggaggcagaggttgcagtgagcagagatcatgacactgcactccagactgggcgacagagcaagactctgtcctctgtccacccgcccccacaaaaaaaggaataaatttaaccaaagaagtgaaagacctggaaactgtaagacattgatgaaagcaattgaagaagccacaaataaatggaaaggtattctgtgttcatgtattggaagaattaatattgttaaaattcctacactacccaaagctttctacagtcaatgcaatctttatcaaaacaccagtgacattttttacagaaattggaaccacaaaagagcttgaagacccaaaataatgttgagcaaaaagaacaaaactggtgtcatcacactacttgacaccaaaatatactacaaagctatggtaaccaaaacagatggtgctggcataaaaacagacacatagaccaatggaataaaacagaggccagaaataaatccacagaattatagccagctgattttcaacaatggtaccaggtatatccaatgcgaaaagaacaatcttctcaataaatggtgctggaaaaaatagatatccacatgcagaaaaaattagacccttatatcagaccatgtacaaaaattaactcataatggattaaaggcataaacgtaagacctgaaactataagactaccagaaggaaacataagggaagtctccatgactatgatctgggcaaaaattttctggatatgacctcaaaagcacaggaaacaaaaccaaatatagacaaatgggattacatcaaactcaaaaagttctgcacagtaaaggaaagaatcaacagagtgaagagaaaacctacagaatgggatgaaatatttgtacaccatacatcttataaggggttagtagccaaaatagatcagtaactcaaacaaataaatagcaagaaaacaaataacccaattaaaaatgagcaaaagatctgagcaggcatttctcaagagaagacattcacatagccaacaggaatacgaaaacatgttcagcatcattaaacatcaggtaaatgtaaataaatccacagtgagatatcaactcaaacctgttagaatgacatcaagaaggcaaaagataacaagtgttcctgagaaggtagagaaaagggaacccttgcacaccgttggtgggaatgtgaattaatataaccattattgaaaacagtaggggctttctcaaaaaaattaaaactagaactaacatatgatccagcagtcccactactggctatataccgaaaggaaatgaaatcaacacgttgaagagatatctgcacacccaagtttattgcagcacattcacaattgctgagatatggaatcaacctaagggtccatcaactggtgaatgaataaaagaaaaaatgtggtatacgtacacaatagaatactgttcatccatgaagagaatgaaacctgccatttgcagcaacatgaatgaacctggaggatattaagttaaataagccaggcagagaaagaaaaaataccacgttatcttactttatgcggaatctgaaaaggttgattttaaagtagagaataaaatgttggttaccagaaggtgaggtagttaagagagagggaggattatgaagataacggttaaataatacatatttacagttagatatgagaaataaaatcaagagatctattgtacaatatggtgactatagttaatgatgatacggattgagtattccttatccaaaatgcttgggacctgaagtgtttcagatttgggattttatggaatgcttacatatacataataaggtatcttgggcatgggacccaagactaaacacaaattcacttatgttttcctgcactttatacacgtaactttgaggtaattttatacagtatttttagcagttttgtgcttgaaaaaaagtttgcattaaatacttatatgtccaattttccacgtatgacatcatttcagtgctcaaaaagtttcagattttggagcatttcagagtgtgtatttttggattagggatgctcaacctaatttttttcaaatgaaaaatactaagagagtggatgttaaatgataacatgtgagggaatgcatttgttaattagctagatttaaccatatcacaatgtatatgtacttcaaaccatcatgttgaacacaataaatacatacaattctctatgttcatttaaaaaataagcttgaaaacaagaattttacaagtttgattttgattctggatttttttaacttagatgcagacatattatctgatcagggcgaacagaatttagcaaatcattataaaatctttttgaaagtaataaaggaataagtaaaggtattgccctccttttttttccttaggaaatgtttagattggtccttagctttgtttcttgttacacctgtagaatatagctgttgcatacataactgtgtctaaataatctggggttcttgttaaattttagagtctgtttcagtaggtttggaatgtgcctgacattcgacatttttttttttttttttttttttttttggagacagagtcttgctctgtcacccaggctggagttcagtggtggctggagtgcagtggtgggatctcggctcactgcaacctccacctccggggttcaagtgattctcctgcctcagcccccagagtagctgggattacaggcgcccaccaccacacccagctaatttttgtatttttagtagagacggtgtttcaccatgttggccaggctggtctcgaactcctgacctcaagtgatctaaccccctcagcctcccaaagttctgggattacaagtgtgagccaccacacccggccagtattcaacatcttacttaacaagctcatatataacggcgatgctgttaattggtaagtagcaagggtgcatgcaggcaaagttttctcagtattgatggaagccctcacttaaacctagatagcatttaataatttgggttattggtgtcctatcctttacttagcagatttttaacatgtcatctggtaaccatggtaaagattatgatactaaaagcatatgttttagggtttaacgtcacaggactttaaaatctcggttatagctttggacaaaaaacttactaaatctcagttttcttatctgcaaaatgtgaataattctacttacacaatactgtgttaatggtttattcaatcacaaaaagcatctaaaatgccccacaattatcatgtgaatttagaaatactagattccttctacacatctacacacagacacacacattaacacacacacacatacacacacaaacaggggggagagagggtgctgtataaggaatccacaagatatgcaaaatgaatctggtatttctaaatatgcatgatatttgtggggcagtttagatgcttcttgtgttttaataaaccatcaacccagtattatgtaggtattatcacttgtgtgtgtgtgaatattcagacacatcttttttcaacatcttcaatgctggagcattgtgtgagctagaacccagctaagagagggaggtcttcaaagttgtaaaacatatgtgctcaagtgagtacaggcatcaaaatgaattcaagagtaccctttaaaatgctgcatgtcatatacctggttatggcttttgggaaaaattctaatttagatccctttccaagtggcacaccatagtgctttgcaaatgatagactcaagaaggaataaatgtattccggctgaaagttttgtcatgggacaattttatgttacataaatggaaattcatttggaagtgacagggaggttaattttaaatcaattcaaaagctatgaatcccttttggcaactattatgtttagtttaaaagaactctgtaggcttattatagataccatgttaagcttttgttgtgcacgtatatgggtgtgtagttcacattctcagtttttattactaaatttttcaatacaaaaattaattcattttaattgacaatcaagtacaagatatatcaaaatcgagcaatacatattttcattttgtatgaaatgtgatgtatatcgtgaaaaaattttaaatgagaacagtaaggttttctatatttttaatatatccgtgcccacttcacaaatagaaatgaaatgccataatcttcatgtatgagaaatattaagttcattcctatattcagttgctattgcccagtggtatgaaagtcctacctcaaaaaggtgtagccaaagaaagataactggcggggcactgtggctcgtgcctgtaatcccagcattttgggaagccaaggtgagtggatcacttgaggtcaggagttcaagtccagcctgaccaacatggtgaaactctgtctctactaaaaaaatacaaaattagccgggcgtggtggcacacgcctgtaatctcagctacttgggaggctgaggcagaagaatcgcttgaacctggaaggcacaggttgcagtgagccgagatcgcgccattgtactccagcctgggcaacaagagtgaaactccatttcaaaaaaaaaagagagaaagaaaaagaaagagggagggagggagggaaggaagggaggaagggagggaaggagggaggaaggggagggagggagggaggaaaccaatggcgtgcgttttatattatttggaaaccttatatttgactcctctaaaattcagaaatggttttatattgtacaaccgtttccctcaaatatttggtaatggggctgacatagtctatccttacttcaaagtagtctgggtttttgctcgctggatgcatgaacatgttgagatatttaatcactacttcttgtgtcacacttccctctgtcacagttggatggggaatgagctgataaaatatacataattaatagataaggtacattgaataatattacaaatacatgtaactggaagaacaataacactaccacccggtccttccccactagcctcaccatttgggagtttttgctaggagagaaaagtggttaatcctcactagcttctcacctcagagattacagatcattctgccctggtgtttgataaggcctccaaaataaagcaaaaagcttctgccagctttttgtgtaggcaaagtgtagtcatctttgtggtaggtggttctgtaaaggacctgctatttacgcctctgttccccaccacaccccacacccaggaaacaacttgaaagaggaaggagagtccggacgcggtggctcacacctgtaatcccagaagtttgggaggccaagttgggtgggtcacttgagatcaggagttcaagaccagcctggccaacatggtgaaaccccatctgtactaaaaatacaacaattagctgggtgtggtggtgcatgcctgtaatcccagctacttgagaggctgaggcaggagaatcactagaacctggaaggctgaggttgcagtgagccgagatcgcgccattgcactccagcctaggtgacaagagggaaactttgtcaaaaaaaaagaaaaaaaaaaaggaaggagaagccaaatattggcactcgttttgcttaatactataacggacaggcgcagtggctcacacctgtaatcccagcactttgggaggccgaggcgggcggatcacgaggtcatgagatcgagaccatcctggctaacaaggtgaaaccccatctctactaaaaatacaaaaaaattagccgggcgtggtggcaggtgcctgtggtcccagctactcaggaggcagaggcaggagaatggcatgaacccgggaggcggagcttgcagtgagccgagatcgcgccactgcactccagcctggacgactgagccagattccgtctcataaaaaaaaaaaaaaataataataataataataatataagttggccagcttggcaagttttgcaaactttggaaaatgtttctcttcctcactatgaattagattaggctgtccttgctaattaatggggacccatgggagatggcgctaatctgggaggagcagattatattctaagggtacaggctcttggatcaggctatctgggattaaatctaccattgactagctgtgtgaccttgagcaaccttgaggttgctaggtgtgtatcacctctgagactcgattgtgacatctataaaatgttgataaaataagtccctaaatgattaaactgttgtgaaaactatattgctgtatgtcattgaatctaagaaataataaattgcaagatagaccattgttgtgtgtaggactaacaaattaaaaaacaggatacccctaaacgctatacactaatgattttaagacatattgattttagaaatgttaaaatgtgaaatgtcatctcagaatcaattaaatacagtagttaattctgatgagttgcttagatcaatacttggcatatagtaaatgatcaatgtttcctattatggggtggaatttccctgaaggaaggcagtcatttctagcttgaaaatggaggccttttagaaaggaagcccatagccttcaataggaaagagtaagaataggaactggtgcgtgctcacaaaaaacgttgtgtaggggttaattttttcctgcttttctgctacacaacacaagaccaagccattgttagtatagagtttggcctttctccatcccttaacgtaattctcttagttacccccaatcccaaccctccagtaaaggccagtattcctacagaactctctgatggagttgtggggactataagggtgagtagtaacaggaggagagcctgttccatgtttggtgtggggctgaagcccatgctgaggggcagcagcacactaggaagagccattgtccagtaaatggacaattgtccagtaaatccatgtggtgacaagcttagcgaacagtggcctgggcgaaagaatcactgagagtggccaggagggatctaaacccagagaagtgattacccaatagacttctgacttaggagtaaatgtgagaagcaaaatctcttttcccagaattttacaaaaaatcgactcttggaatggcagcggtggctaatacttaggtcacgtagatgataaaattataagacaatatacataatctagactgctgttcattgaatcatgtcagtgtgtttgccacatttcttctaaaagaacatttttcatattttatcatttctgcaatcagtagtagtaataataatatctaacacatacaacttagtatgttctgggtggtattctaagtgcattgtcgatattaagtcatttgtaactcagtgagttagcaacagttgttatccctcatttaacaattggggaaactgaggtgtgaaaaattttcttctccaaggtgtcacacattcacaaatacacacagacacacacacacatagacgcacacacaaacacacacacacacccatctattaagtggtagaggttggcagcatgatcctaaccgttgcatgctcatactattttacaagaccatatgatctaaaatctattggtagcttagaatttatgtaccgctaaatatgtacatctattgtgtactcacaaaaattaaaaataaaaaaataatttaggatatctgttatggtggttaaattgtgcctgcagtgcaattccaatctaccttcctgcgtcctgggaactctgaggaccggtatagagcaatgacaggaagcaagggctctggcttcatatctgcattggaatccaagctctgacacaagctaagcaagcttgagaaactttttaaaagttaaacattttattttcaaagagttgtagagttaagaacagttgtaaaaaataatataaaagatcctatgtgaaatatcctgtgtggcttttgctcggttatccccaattgtaatatcttgcaaattatattcaaacattataatgaggattttgttacaattaacctctctaattcagattttcccagttttacctatactcatgtgtgtgtatatatttagttaaatgcaatttttacacatgtagattagtgcgtccaccacgacagtcaaaatacggatgttacatgaccacaaagatctctcctgttgacctttaataaaatcatcaagcttcctcttgtcaccctgtcccatgcctaacatgtggcaaccattaatctgttcttcatgtctataattttgtcatttcaagaatattatgcaaatagaattgtatggtatttaatcctttcgaactagcttttttcagccagcataattgcttaatgatccatctaaattgttgcatattgcaatagtttgttactttttattactaatatatgttgctgatttatttatggttgtggacatcctacagtttcaccattcactgactgagagatattgttgtttacagtgtggggctgttactaataaaattgctgtgaaccctaatgtacaggatttgtgtgaacataagtcttcatttctctgggataaatgcccaggagtgcactttttggactataatggtagtctcatatgtcgtattgatgttgtcgtttatttttaaatttctttttcattgacaattaatatttgtttgtatttataggttacaatatggtgctttgatatatgcttacaatgcagagtgattaaatcaggttaatgaatctgttacctcatattttttttgtggtgaaaatattaaaatccactatttcagcaattttgaaatatatgatgcattatgatatattatagtcaccatcatgtacaatagatcactaaagcttcttcctcctacctaactaaaaattcgtaccctttgatcaacatctttcttttcccggtaggacccttccgccatttctgtggtaatcttcattctaatctgtatttctatgagttcaacttttttagattctgtccatcatcagatgaataaataattaaaatgcagcctccacctgctgggtttaagcgattctcatgcctcagtctcttgagtagctgggactgcaggcgcccgccaccatgctcggctaattttttgtatttttagtagagaaggggtttcaacatgttgaccatgctggtctcaaactcctgacctcaagtgatctgcccctctcggcctcccaaagtgctaggattacaggtgtgagactccgcacctggctcctttagcttttaagaagagaaagaattgaaattatgattacaaccaagtgaagttgaacttgaactcctaattagaggatggttctgatgttaatttacgtaaaggaattgtgatttttgtttttctgctcccactccaatccgttttttcccacacagaatattcccaactcttccttcttgaacctttgtaacattactggcattcgtttctcttatccataagctctaatcatccaatgtttcttcttgctgttattatattgaacaaatatttattagatcaatcaggaataggaagaatagataattttgttttactttcattttttccttctctaatgtacttcctttctttatgtagatctaagtttctgacttacatcattttctttttctctgaagtccttcttttgacatttcttgcaaggcagatctactggcagcaaattccctcagcgtgtttgtctgataaagtattcatttctcttttacttttgaaggataatttcaccaatacagcattttaggttggtggatttattttttctctctaaattttaaatatttcagtacactcttttcttgctggcttggcccaatccattttatgctcttttttgttctgctctgtcactgtgaagctgacccctataaattgcatttccttagctcccttgccgagtagtctcctgttggttttggccaatggaaggcataaacataagacagaaaggcagaaagagagcagatctgggacattccttttacattgacctccactctctttgtgccttatttcccaccatggcagcttatatctctaactatcctgttaagaatctcctctatggctctatctcttactggatttagaaaatcctacttccttcacttgactcttcaggcatggtaaggctgggaaaggtatatcacaattgcctactggaggttgtctctaggtgcctcgatagccccttttggtttctttaagcccattcacacctctgaaagtagttcctttgtactgttttattgaaccatccatgttgaattctatttcttgccagggacatggctgataaagggagataagaaaaatcagtaacttctccctttgaagtaacaaagtataagatgaaagtaaatgaaactcatagttactttaagaaaatgcgtttgtgtatatataaacaatttctacttttcatgactctatctggtggtttttagtataaaatactcactagaacgtgagattaaagtttgccactccatactgatttgcatatggactgttcgctcaagaagtaagggttgaagaaattggaacgacttatcatttaaatcaggaatcatatgacaattcaactggtgacaatgtgccctactttctaagagcccaagttgtacatatgattgcttgtgtatgtatgtgtaagtcactccacgcacatatgcacgtcacccttgagttctgagtttacaaaactaaactaaattcagttactaaaaatatcaaatttgtgtaattttcatgtatttctatgcaagcacatcattactgaaaggccctattatactgttgcaaaatactcatgaagtaccaaggtgcctgattccaactgttatttatttttttttttttttggctattatgttcctaacatagcacataaactagctcattttctcatggtacttaactaaggatacttttttaaaatctagagtattacagggtctttgcatacctacctcttaaactgatttgttttggattctggaaaacttagcacgttggttaagtggctgtgaagaaattttgatgtatacgtccacctcacatagacctaatagctatgtgtttggctagtattttgtggaaacaaataattaagagcaagaaaagttggatttccttaagaacactgaatcgcatagagattgggtaattactggagacaaaaaggcctgtcaataaaggtcagatatatgcaactccctccttttgctgaaaatctattattccatgttgaattagatattaaaagaatattatactttccaataattatattgttataatgcaggggatatatttctcaccaatgactctacatccacaatgtatgatgaaataaaatatatatttatttttaaaaatgcctttagggttttaagatacttaagaattcatttcttgttcacttttaaatttagtgctcttagttctaagagtttgtcatctgttttatgatacaggttaatactgcaatataagcaaggaccagtcttcattttacaacatgtatcataaaactgtaggctaaagaaaagtaattaaaaaacactctgatgcatgactttaatgtaattaaaatatattttgcattcatgaaaaattacaggtctctatcaatccctctataaacaattataatcttattacttaaaattatttcaacatcatacacatatggtgtatatttagctatagtcgtttaggtttttaaaatctgctttcttttctaaatcataattttagaccttttgctatgttcgcaatctttgtgtaatcacatgcatagcagacaatagcacattgtaagtatattagaaatatgaaaacacagtctaatctcaatgcaaaacactgttgaaaaacacagcatgataaaaaattaacttataaatggagagatatactctgctaatggattggaatactcaacatggtaaagatgtcaattatctccaaattaatctatagttttaatgccatttctactaaaataccagcaaggtctttttagtagacttggatcagcttattctaaatttatacggaaaagtacaagcctgataatagctaatacaatcttgacaaagaagaataaagtggaaagaatcactccactaaatattaaggcttattatgtagctacagtaatcaagacagtgtggaattgggggagagatagacgcatagttcaatgcaatagaatagagattccagaaatagacccgcacaaatatgtgcaaactcattttttaaaaagttgtgaaagcaattccaaggaggaattttaacagcctttccatttctatagccttttcaacaaatagtgtgcgttttttctaagtgagtggtgtttgagcaagtagacatctaaaggcaaaacaaacaaagcccacccataaatatataagtaaataaatagagcctcaacttaagtcttatgcaaaattatctcaaatgtcaaatataaaacataaaactacaaatattttagaaaaacatatgggagaaaattttgtgactgaggcaaagactttttacactttacacaaatagcacaatccataaaaaagaaaaactgataaattggacttcgttaaaattaaaacttttgatctgaaaaggatcctcttaagaagtgaaatacaaggtacagaatgggagaaaatatttgcatatcagttgcaaaaacagggactatatacgaagaacttagaaaactcaaaagcaaaaatccaaaaataaattaattaggaaatgagccaaaggcacgaagagacattttactgaatagtatatataaatgacaaacatatggaaaagatattaaatatcactagacatcaagcaaatataaattgaaaccacagtgagataaaactacacatttttcagagtgtctgaaataaaaaatagtgacactaccaccaaataactagcaaaaatgtggagaaatgggatcactcgtacattactgaaaagaatatcagtctggaaaatagtttggcagtttgttaaaaataaacaaacactgtgtatgtttaccactccagcctgggcaacagagtgagaccctgtctcaaaaaaaaaaaaagctgaagaaaaatttttttaaatggggaatataggtggaagtgagagcctgatagcctaatatactttatcttttctaatgtatttaactgctgctcttatcattgcttctatttaaaaatgtattatatttttgctaaccaaccttctaggagccaattgtactctcagatttccccgttttcatactgaggttttatcgaagtagcccttctccaagtccctcccctttttattttaaatatagagattttaaactatttctaatcttactctcttctccaagttcctgaaggtattacctcagaatatgaaaacccttaaatgtacctcatttgctaacgtggagagagagacatgtaccttggaagataatttgtgatggaaaaagcatatgcctacacacacacacacacacacacacacacacacacttaaacttgggttcaataacatattaaacttgggttcaataacatcatacttctcaatattccaaataaagttaactctaaagattcaccataagattttcaatattttaaaaatgtttaaggaaatataaatgctttaggttgtttaggttgtttagacatctattaaacccagaatatactttaagcactaatctttaatatactatagattaaaagctatctttcaaataaccagacttcacaatgtttaaacattttataaaactgaacagaattttgagacataaaccaatataaaactttttttatcctcctctaaattcaatccatttgtgaaacctcatttaaattcgaatcaaatattttctctgatttccattaacaggctctgactctcaggcttcagtgagtaagtatattcattgtggggctcagaaaattttgaaccaaattataaatggtgtttatttgtgttttctttccatttctttttaaggcattctgtagtgaggtattcaaaacaggatgccactcaaagactctctctctctctctctctctctttaaaaactattagagaaaatagcatgtgcagcttcatctgctacataaatcctctcaaagcttctctcctttccagatgatttgagttgtcaggaagcaaatgaagcttaagcttttgggcccctttatttcatagaagtcttcaaaaatatgtgcagaactttcatataatcacgtgctcgaaaaatatgcacaactaagaatagcctcgagctttaggcaccgcaatcgttggatcttctgttcttatcaattcttaccaattgtttcttaggatgacacattaaaccttcagaaaaaccttatcaggatgaaaacttagccttgccatggaaaaaaatggtggttttaagaacagagtaaaaaaataattctaacagggaggggatttttttcttttgcttttttaaagaaagaaattaggaaaggattttaatttgagcctacaagtttgctgaagttgcactctaaaatgtcatccacatagatttatattgttttctttactctttcttgtgtagtaataacttggtctaggctttcaataaataaacttatgaaacagttttgagtattaacaataacacaatggcactgagagcctgtttttacaagactctaaatattttatttaaacgatacccagaattctgatttgcatatttaaaattttcctgaattagataattcttttaagtgtgttacgttatataatctagttgcagtatccttttaacaaaaaaaagcaagtgcaacagtgttaaacatgacattgatgccacctaatctccatcaggcttcacaatgtagttttatcttatatttatttgtatgcacgaatgtcagtgtcgtatggcaggagtctgtaaactttggctcataggctaaacccagcccactgtcttttaaaaaaaaaagatagatagataactgtaaattcacatgcagttgtaagaaataatacagaaagatcctgtgtgccattttacccagtccctccttaaggtaaagtcacagaactatagaacaatattacaacaagatattgacatcagcacagataaaatacaggatatttccatcaccacaaggatcactcatgttgccctttcatggtcagacccacttttttcctgccctcaggcactccttaatctctagcaactactaatatgatctctatttgtataattttatcatctcaaaagtgttatgtaaatgaaaccctgtattatgtagctatttaggactagccttgttcactcagcataattctctggagattcttccagatttgtaatgtgcatcaacaatgtgttcctttgtactgctgagtagtattccatggtatgaatatgccagtttgattaaccatttgcctgttgaaggacatctgggttgtttccagtttctgcctattacaaatacagctgctatgaagactcatgtacagtttttttatgagcaaattttcatttatctgggattaatgccatggaatgaaatttctgggctgtaggttagttgtatgtttagttttttacaatgcaccaaacttttacagagtacctttaccatctcatgtttccaccaacaatgtgtaagtgatctcatttctctgcattcttgccagtgtttgatgttgtcactattttttaacttagccattctaatatgcacagagttatatcgtattgaggttttaattcgaatttccctaagagccaatgatgctgaacatcttttcacaagcttatccgccatctatgtgttgtctttggtgaaatgtctccatgtcttttgcccatttttctaatggatttttttgtgtctattttgtttttacttttgggttacatgaattcttcatttagtctagatactagtgcatggtcagatatatggtttgcaggtatttttctcgatgtgcagcctgtctcttcatcctcttggcagcatctttctcagagcaaaattttaaaattttgtatgtcaaatttatcaaattgtgtcttttaaggcacacgattttaacgtcaaatctaagaactcctcctagcctttcatcctgaagactctcctgtatgtttttgtaaaatatttattattttgtgtttcacatttaaattcatcatctatttgcattttattttgcataaggtgtaaagttatgtcaaggttctttttcttcttttttctttccattatttttgtccacttgttctaagacccatgtgttgaaaagactatctttgctccactgaattattttgcactgtgtcaaaatcagttgagcaatttgtgtgggtctatttctgaagtctctattctgttccattaatctgcgtgtctatcccaacaccaacaccacactatcttgattactgtagctatttaataagtcttcagtctggtagacttattcctcttacttcattcttccttttcaacattgttttagctattctaaatccattgccttttcacataaattttagagtgccttttcacataaatttttcctacacctaaattccaaaaatattgctgagattttgataaaaattgtgtaaactgtgtaacagtttgggtaaaattgacattactgtgttgaatctctcaatccacgagcacaatatatttcttcattaatttagatgttctatgatttacttctaaaacttttttttgctttcaccatgtaagtacatggcttgttagatttatatttaatttttgtgacatagtaaaatatactatattttaaatttccatgtccatatgttcattattaattcacagaatgcaagtgattgttaatagactttatttttggagaacctttaggttcacagcaaaattgaaagacagagatttcccatctacccattgtgcccgcacgagcatggcctctgtcattattaataactctcaccagagtggtacattcgttacaataaatgaacctacgtcaacacatcattataactcagatccataggttccattagagtttactcttgttgttgtgttttctgtgtgtttggacaaatttatagtgatgtgtatctactatgataatatcatacagagtagtttcactgacctaaaatatttgtgctctgcctagtcatgcctccctgccaactaacccctggcaaccactgatatttttactatcttcataattttacctttcctggatgtcatatagttggaatcctacagtatatagaagcattttcagattggcttccttcagttagaaacaggcatttaagtttccttagtgtattttcatgtcttgatagctcatttctttttagcatctatagtctgaatgtaccagtttatttatccattcacctactgaagaacatcttgttgtttccaagttcaggcaattatgaataaagctgctataaacatccatctgcaggtttttgtgcggacataagttttcagcttatttgggtaaataccaaagagtctaattacttgatcatatagcaagagtatgtttagttttgtaaaaaatccttaaactgattttcagtggttgtacaagtttacattctcacaagcaatgaacaagagttcctattactccatatcctcaccagcattgggtggtgtcactgttctgagtgttgaccattctaagaggtatgtagtagcatcacattgttgttttaatttgcaatttcctgatgacatatgatgtgaagcgtcttttcatacgcctgttttccatctgtatatcttctttggtgagttatctgttaaggtgttttgcccatttttaaaatagagttgtttgttttcttattgttgatttttaacagttctttgtatattttggataacagtccattacctgatatgtcttttgcaaatattctctcctattctgtggcttgtctttacattcttttgacaatgtcttttgcagcatagaatttttcaatattaatgaagtcctgcttatcaattatttcttgcataggtcatgtctttggtgttatatctaaaaagtcatcaccagacccatatagattttctcctatgttatcttctgtgggctttatagttttgcattttacatttaagtttctgatccattttgagttaatgtttgtgaaaggtgtttgcatgtggatgcccagttgttccagcaccatttattgaaaaggttgtctttgctccgttatcaaacatcagtcagttgactatatttatgtgggtttattcctgggctctctattctgttccattgatctcttcttttgccaataagacactgtcttgattaccgaagtcttgaagtagagcagtctcaatcttctgactttgtgcttgtccttcaatattgtttttgtttgtttgtttgtttgtttgagatggagtctccctctctctgtcacccaggctggagtgcaatggcatgatctcggctcactgcaatctccgcctcctgggttcaagcgattctttcatttcagcctctcaagtagctgggattacaggcgtgtgccaccactcccagctaatttttgttgtttttagtacagacggggcttcatgatgttggccaggctggtctcatactcctgacctcaagtgatctgcccaccttggcctcccaaagtgctgggattacaggtgtgagccaccacgcccagcccttcaatgttgttttggctattcaaggtttcttgcctttccatatcatttttagaatctctttgttaatatctgcaaagtaactactgagattttgattgggattacattgagtctatagatcaatttgagaataactgacataataaaaatattgagccttcccatccatgaatatggattatcttctatgatttctttcatcagagggttgcagttttcctcatatagatatggtatgtattttgctagttttagatctaagaatttcatttgtgggaggtgctaatgtaaatggttacaatcaatttttgtatatttatcttgcatcctgctaccttgatgaattcacttatcaataatttctaggagattatttatagatagcttgaaaattttattttcatgccatctacatataagggacaattttatgtcttcctttcccatctgtatggattgatttaattgtcttgcctcattgcactggctagaacttgtagcagtacgtgaataagagtggtgagcgtgtgcattcacgccttgttcacaatattaaggggaaagcatttaatacttcactattaagtatgaagttagctgtaggtttatgtagatgttgtttattaagttgaggaaattctcctttagtcctatttttcagacaggttgtttcaagattagatatatcagtttgtcaaatgcttttagtacatttactgataacatcgtgtgatttttcctctatgacctgttaatatggtagattgtagtgactaattttcaaatatcaagccagatttacatcctggaaataaaccccaagtgatccattagtacattgctgaattttatgtgctgaaattgtattaataaattttccattaatatttgtaaggaatatggatttatagttttcttcttttgtactgtttttctggtttgggtatcaggctattgctggactcaacacatatactcagaattgttttcttcccttccatgttctggaaaagaatgtgtagaattggtgttaattcttcacaagattggcatacttttccaatgcagttatagaagtttgcttttgtagaagtttttaaattatgagttatatttccttaacagttatactcattatctagtatatccaaattactattaaatagccaaagtctaggccattcaaattatccattttatattcattgatttacagtagtttgtgccttttgaagaatcaatctatttcatctaaattattaaatacttatgtgaagaattgttcatagtaaacccttactgtctttttttttctttgtattttccaggcctgtagtaatattccctacttcatttctgatacgggtaacttgtgtcctctcaattttttctttgtcacttttagcacattgtcaattttattgaccgttttgaaaaaatagctctttgttaatgaatcttctttactgtttttctgtttttattttgattagtttttactctttattattttcttcttgagatgagaactttgattattgatctgagacttttcatcttgtctagtgtatgcgtttgggagcagctttttaaaacgcaatgcttaatttaacctaaatgacaatattttatagtaggcagtgcatacggtgttatctttaaaacctggtcttgctattaggtacctctctgagacgaaagtcttcaagcttattgaagtttatcaattagcaggtcgattaaaatgtcaacttttcttttaatatacccaaggtataatctatttgagggcagggacctgaagttgttagctcatatctttaatgcagaaaatctggccctaataaatgtttcataaataaatacacatttattccacggcccagttccattgttttaaatgagaatttgtcactatggtcatcccatagtaccaaggttcataatttcttttagcatacactctcaaagagatttggtttgctactctcaaacattcaaagtttattttaaattttatgatgatctggatcataaatttctttatttccctctcttgcctgtttccttttttccaactgatatcactaaactcctattacacccaatgtgcttttgagagctaaagttatcaacataatataaatagcaattaattcttaatatcaagaagtttacagctgagtagtaaagatgcattcatattgttagacccatctatgagtgggagtgaggagaagctaaaaaaaataatcttcataaagtaaatttaaacaaagcccagaagaatgagggagcatataatacacaaaggatataatacaaagaaattgcaagtggagacaattttattcacacaacaaaatgacaagcaatagtgataaagcaactaaaaaggaagacacaactgttttgatggagcttgccttccatcaggtaagaaacaccttaaacatacacccaatttatttatcacacatgcaaaaagggagtaaagctgcatgctcagaaaacatgtatgatgaattttttaaataatctgagatataatagtaggaaagcacataacataactcaaggaagttcagagatgtagggttgaaaatgaaggcaaaggctacattgcgtaggatctattcatccttgatcatattttctacaaggtatcacactagtactgagtatccatccaagactgaaatggtaggggtgagcctgcttgctaaaaattcttcagttgtattagtggcagtggctccactcctcgctaccacacccattttgcaattctctgccctgttttttgccctggaaagcttgtctcttcatttgtatcaccaacgcctcttgtgcactaacttttaggaaattatgtgacaccagctggacatcagagggcaagggaaaaaaaggtttggatatttgtgttccacttcacatatgcctcactaaggtcctggtagtgactgcccttttctattgctattccaacattattcctttaccttgacatattaggcctggaggtagaaacaaattacctctcttgctgcttgctaggtgactcaccatcccttatttgttctcatcagcctgcctatatgtttgtccatagttctttcaccgaattattatctgttaaatgcttttgaatctgctacctatatttcctaccaggatcttcactaataccccataagagatacaactattaaaacatgttactgattctcagctcactagcatcaatgcatttactatctttgtactcataatacctttcttacattcagaaatctttaaaaatcttcattaatccctgtacatttacctcataaaacagttgggaatcaatccacaaagtgaggagtcattattttcacaacacaggcaaattagttttgagttttgcttatatttggtaagcaaatgttttctttcttgactctatagatagtactgatatgtagtaccaagtcctgaaatcacatcgttatgtgaatgccatgggcttcattgtctatggaaatgtgagttaaagctctttttttttttttgtccagtggaaaaaaaaatctgaacatttaaaaatgaactcacaaggttccagatatctacttactaattttaaagggaattaagatggtgtcaagtaaaatttatttacagaacacacacacacacacacacacacacacacacacacacacacacacacaataatctctaaagtatcaaccatagatggagtggggaaccaggaccttcactcccacctggcaataaggcagcacacttctacctctatcttccaccagaacagtcagaaggggacgagctaaaatagatttaaataagatccagagtctgataatgtaatatcccaaatgccaaaaaagaaaatctcaactggaatgcaaaaagatagtagtcacttatactgacatgacaaagatgacagaattatctagcaaggatattaaagtagccatcccgaaaattgttgagtaagctttttaaaacattttgcaacaaataaaaaatgggaaaagtcagaaagaaatagaagacatagaacgacatgacattttagaactaaaaatatcgtaatcaaaaaaaagttcaataaatggtctcaacagtagaatggaggtgaggagacaggggaaatctgtgtgcagaaagataggacaatagaaattacacagtcgtaacaagaaggaaaaaaacgatttttaaaatgaaaatattctcagttgtcctatgggattataataaaagatctacggtttatgccatcagagtttcaaaaagggagggtgttgttgaacaagtactcaagcacataatgattgaaaaataccaaattttgtaaaatgcaaaaccctacagattcaaggagctgagtatacaggataaacccaaagaaactcatgcttagacgcatcatagtcaaatgtctgaaaactagttatattttttttttaaaaaaagtcttaaaaacagtgaaagagaaaaagacactttatctataggcaaaaaagttcaaatggcagaggatttcttatgtgaaaccatgaaagcccgaaggaagaagtatgacatttttcaagtgatgaaaggagagaactgtcaacttccagaaaatagaagaggaggcaacacttccaaatgtactttatgaggaagaagtattttgataataaaaccaggtaagcacagtagaagagtcaacaaattacagaccaataaaactcatggatatagagacaaaaagccttaacaaatttttacacattatattaagaagctaaagaagaataatcacttgatcatatcaattgatggaggggaaaaaacgtttgacaaaattcagtgccccatttatgataaaagctctcagaaaactaacaatggaggagaacgtcctcaacttggaaaagaataactacagaaatcttatagctaacattgtaataataatgaaagaatttacacctttcttcctaatattaggattaaggcaaagacggttgctttcagccctactattattcatagtactggaagttctagctagtgtaaaaatgcaagaaaagtggataaaagcgtacaaatcaggaaggaaaagttatactgtctccatttgcagatgttatgatgatctatgtaaaatcccaggtattctacaaagttactcttagaaatgatgagtttgttaaggtcttaggatacaagatcaacttataaaagtcaattgctaatcaatgaatatgaagtttcatttatataagatgaataagttctagagatctgctgtacaacatcgtatctatatgtaacaatacagcattataatttaagaatctgttcgttgggtagatctcatattaaatcttatcacagtaaaatgattattaaaaattaattgtatttttgtatacaagcaattaactactgaaacccaaaatttttcacatagtatcttgcagtcactctgaaacaatgaaatacttatgaatctaataaaacatttaccagatctatatactacaaactaaaaagctaaggaaataatgcaaagacttaaataaacggagatatatactgtattaatggaattggaggatacaacatagtaaatatatcaattcttccaaaactaatctatagtttgaatgcaattcctatcaaaacatcagtgaaacatttttgtctatttggacaccctccaaattgcttgaattctatttgtcttattttttctggtcctagtgcctataaactcactcacaaactagcatattttcccattggacttaactaaagagattttttaaacacctaagaaatatatgccttataatatgggtaacatttcaaccaatatggatcactgtggaaaaaggaagtagaaatgatccataatgattttttccctaatcaataaatttgtgaattttatataagtatattacctaataagcctgtttctcttcaacttatttgtcctgtgaagctgcattaatcataatgcttggaattatattaaataatcaaacaagttgggaaaatgaccctgcacttccaaagtaatataaaataatgcctttagggtttccaattatttaagaattaactccttgttcactttacgtttaccatattcagttctttctaattaatatgccatctatttaataacacaaggatgactggttaatattggaatataatcatgggccagtcttcattttacaacatgtatcatctaagtgtagacaaaaaaaagtaatttaaaaaaatgtgtatgagttcactgtaataaaaattatgctttatatttttgaaaaatgtatgtctaattaattcatctgtaaacaattgtaatttcattaaaattttaacaaaataatttcaactttcattttgaatcgggggtacatgttcaggagtttgttacaagggcatattgtgtgatgtggaggtttggggtactgatgatccagtcacccaggtagtgagcattgtacccagtaggtagtttttcagctcacacccgcttccctccattccccctctagtagtccccagtatctcttgttcccatctttatgtccactgtgtactcagtgttttgctcccatttataagtgagaacatgcggtatttggttttctgttcctgtgttaatttgcataggataatggcctccagctgcattcatcttgctgcaaagtacatgatttcattctttttcatgaccatgcagctaaccaaggaggtgaaagaactatacaaggagaactacaaaacactgctgaaagaaatcagagacaacacaaataaatgcaaaacatttcatgctcttggattggaagaataaatattgttaaaatggccatactgcccaaagcaatttacagattcagtgctaatcttatcaaactaccaacgtcaattttcatttttcattttcattagaaaagactaatccaaatttgtatggaaccaaaagagcccatagagccaaagcaatcttaagctaaaagaataaagcaagaggcatcacactacctgacttcaagctatactataagcctacagtaacccaaacagcatggtactggtacaaaaacagaccatagaccaatggaacagaatagtgaacccagaaacaaagcgacacacctataaccatctgatctttgactaagtcaacaaaaataagcaatggggaaaggacttcctattcaatagatggtgctgggaaaactggctggccacatgcagaagattgaaattggacctctacttttcattatatacaaaaatcaactgacggtgaactaaaggtttaaatataagacctcatactgtaaaaaatcctagaagaaaacctaggaagtacccttttttacattggtcttggcaaagaatttatgactaagtccccaaaagccattgcaacaaaaacaaaaattgacaagtggaacttgactaagccaaagagcttctgcaaagcaaaagaaacatcaacaaagtaaacagacgaagaatgggagaaaatattcacaaaatatgcatctgacaaaggcctagtatccagaatctataagaaacttaaatcaacaaaccaaatacaaatacattcattaaaaatgggcaaagtatatgaacagacacttttttttttttttttgagatagggtcttgctcttagtccaggctgaagtgcagtggcacagtctcggctcactgcaaacttcacctcccctgctcaagcgattctccagcctcagcctcctgagtggctgtgatgacaggcgcctgacatcacggctgtattttttttagagatggggtttcaccatgtcgccctggctggtcttgaactcctgagctcaaagcgatctgcctgcctcaacttctcaaagtaatagaattacaggcatgagctaacacacccggcctgaacagacacttcttgaaagaagacatacaagcggccaacaagcatataacattttttaacaacgtaaacatttttaaatgtgcttctttttacaaactggccgagtgtggtggctcatgcctataatcccagctcctggggaggctgaggcaggaggattacttgaggccagaagttaaagaccagcctgcgcaacataacaagaccctgtctctaaaaaaaatattaaattagctgaatatggtggcattcacctgtagacccagctactcagaagattgaggcaggaggatcacttgagcccaggagtttgagactataacgaggtatgattgtgtcgctacactccagcctggatgacagagcaagcctccatctcttaaatgaaaatttcttaaaaagcaaaaacaaacaggaaaagaacgggttttggaaactctgctgttttcctttttttgtgcaatcacatgcataaccgacagtagtgccattatattagaaatattaatatatctaatcacaacacaaagcactgtgtaaaaaagccgagtatgatgaaataaattaaagataacctaaatattggacatatgtactatgttaatgaattggaggaatcaatgcggtaaaaacatcaattcttccaaaatgtattcataattttaatgcaattcctatcaaaattctacctgaaagatattctgtagatagatctgtagatctatttgtagataaacttattctaaaatttatatggtaaattataaccacactctgggacatgaatctagaggaatgaaaaatgaaaaactacatgattgttttgcagctttatttgtagtgaccaaaccctggaaacaacgaaaatatcccacagtatgtgaataaagtaactatagaacatccatgccatgaactactactcagcaataaaaggaaataagctattgatgacaacttaaatggatctcaagtacagaatgccaaaaaaaaaaaaaaagccaatctcaaaaggttacataccgaatcattgcatttatctaatattcttaaaatgacaaaattacagtgatggagaacaaattgattggtaccaggctttagggatatttagggagggtgactgttgtgactgtaaaggggtagcatgaggcaaatctctgtggtgatgaaacaggtgtttatttgtggaggttgaggttacacaaatcagtgatgaaatagaaatatgtatacatatcaatgtcagtttcctggttttgatactgaattgtagttattgtaggatactgaattgtagttattgtagttaatctttgggagaaactgggtgaagggtacatgggatctctgtatactatccccgcaaattcctgtgaatctataagtatttgaaaataacaagttaaaataaatttttaaaaattctgtgacagttattaaaaatggaaatttgagcaagttcctttattatggggctaataagacctacaagatgtagttattctgaggactaaaggagaaagataagtgattaagggacacaagaaagtactgtggtgacacagtctgaactggagttcaatttgttcggtctaaattttattttacgtgcctttcacttttccagttattgtaagcatatatttgcacctggattataaaatcttaagggaagtatatgcattccacacaatgcagaaatcattataggtgccaaataaattctgattatcaactaaggctgaatggcaattaaatgtatctcagggcattcagatctatcaggatttggtgctttagacattacccaggacacatctttgttacatttagaaccacggttgtttttagaaacatacactttagggtttctcaaagttgaccatgcattagaatcaccggtaaaacacagagtgctgtgtcccaaccccagaatttctgacttttgaggtctcgtgtcaacttgcatttctcagaagttcccacgtgatattgatgttggtttgggaccgacaagttgtattcacgccttggcctaaacaagggtttatgtttgtagaaaactcacagtgcaagatacaaagggcacttatactctgggcaatattgtacctcacagcatagagggacactgatgctaacatgcagacttagagccaaatcagccccaaaacaattttttcattttttctatgttgttttatgaaaattttgcttatatgcatatttagacaaccacactgagaggaaaggaggtgacctagggaaaagaatgttttaaattaaaattaggccttatgttttatctcatacaccttttgctggggaaaatagcaatgttatgacaataatattctaaaacacaaaatgtacaattaactattaaggtaaacatcacagtctgactcaatatttttttaatttttatctattactcattgcagtcgcaagcagttgaatgtttgacatagaaaaatgagtctgtcactttaacaaatggtacaataaaaacactcaaacaaaaattttagtagggattattataactataaaaagaatatctttctttaaaaaatgtttccaatgttttctatcaattttgggctcgcctgttgcataaaagtaataaggaacaagatgaagaagctttctattggcaaagaatgatttacatgctgaatgacataatacaactgtattcacttaatacagaaaacaagcctctattcagaaccattaaatgatcattaactcaatgtctaaaaaaatggtgttttaagaattggcaccagagaaatggaagaaagaataatttgttagtaaagaagttttagcataattcacaactgaaatttaggatttgagaaaaatttctttcctgcattataagagtattctttattttagcaggaaaacatgtcccatgagacctatacacacacacattctgccttcagaattcagctgctgcattctgctgctgcttctcttattcagactgttggcatcatcaatacataacttttgattgaatcccaaggggaaaaaataactttggtagacagtggatacataacaaatgcatggattattctgggcattcctttttatttggtagagtgaaatttttggtgttgttgagaggataaaaaaggcatttaaaagtcaattttgaatccggattttctgctctgttaataaattcacatgaaagttacagaaagtattgttatgcttttgtactgaatagtttttgtgtttagaaggctttaaaagcaagtactatgtccactgtgctattctggtttggatattaatcagaacacagttgagcattgtttgaattcacagagcttgccatgctggaagcacaaccttatatgtagtgaccatggacagtcctattatgggaaaccaacttgagagagaaggcgggtcacttgcttgtgcgcaggtcctggaatttgaaatatccgggggcctctacagaatcctggcatcagttactgtgttgactcactcagtgttgggatcactcactttccccctacaggactcagatctgggaggcaattaccttcggagaaaaacgaataggaaaaactgaagtgttactttttttaaagctgctgaagtttgttggtttctcattgtttttaagcctactggagcaataaagtttgaagaacttttaccaggttttttttatcgctgccttgatatacacttttcaaaatgctttggtgggaagaagtagaggactgttgtaagtacaaagtaactaaaaatatattttactgtggcataacgtttagtttgtgacaagctcactaattaggtagattgattttaaattatcacagtagtttgcaaagaagcataaatgttatatatactgcatatatatatgtatttattcaggaatatatatttttcattgggaaaacttttcaacagaaatggagtgtaaaagtttttctttgcgatagaactaaacacatgatttcttgattaacaaaccactgcagtaatagaatatgcagaatgtcatttgactataacagatttattttgattgctgtgagatagtttgtatatctgagttattattttgattagttgatacttccgtatttagtaacagttacataaaggttactgacctgacatatattctcaattgaactaactactgtataggaactacatggaggcctaaaagttagaaaaagtttctctgacacatcatggataaaataaagaataaaatgagttgggacggataattgaaggatgtgaaaagtattgataaagatttaattttaatgtttcttactcacatttactatttcaaatgctcttttctgtagcatatcatgataattatttcaaataatgatgtgatctatgctatcaaatgatcagatgatttcttgggtaaacgacatacaaacttgaggaactcctaattatatttagtagtaaagtcaccttgttgtttcatgtctattatgagccagcttttcagttcaattttttagtttgtctttcatatagaaatacaactatttcgtttatttttaagaaagtcatgatgactaatgaaggatttaaaaatggactgtggcacaacagtaaaaataatatatgataaggactgtgtgtcccgaagagatgggagtttatctcttccccacccatctttgacttgtggagtgtagttattctaaaatagatatgagggcaatgcctataattaagaatgaaaaaataaatctctccaaataagtaatgctccacaactactaaaaaaaaaggcagaagttttgccactgggaaaactttgtggaaataagttaacattgtccatgtattgagtcacattaaaagctaccagactttataatacaatatttacttacattgttggcttgcttcataaatttcttttggtggacatcattattacttttagattgaaaaactattatatttactatcattacaaatatatgcatggcatatatctgttgtttgcaatatacacacacatttttattttttgtttttatttctttgatatatgtaacataaataccatcaaaatcactagtgattttatatatatatatattctacataattaacatcatatacaagtatatagagcaattttgaaagaatatatgcaattctgctgaaattaagcaaggtaaatctacactctgctttgtcatagatattcaaataactttcaattcttagaatgcgaagaaaggtaatctttttgggacatgccctgtaggattttttcacgctgcatttaaaaaatcatcaagtaatgcctatgcaacatgacaatgagtttggtaagaaaaaacggagatatactcagggctatattatacattaaattttgctgtttgacaacatactgctacttggatgtttgacatttgaatccagtttgtaaatttgccgtagtttgataaacttacaaaagtacgttttgttgttttttaaccaaaacagttaccctttaaaagagatcactgtattgtcaaacatattgtattgttcacttttagaattactcaaataatgcattgtaaagaattattcaaatagtgtactgcaaatagacatttcatttgaatatatttaaatgatgtaagtcatctgaggtctaataaaatcaccttttagaatttcatctgcagaatcttttaaagacatcttaactacgaaaaagagattgctgatctaaattgatgatatactgttaatacaaagcttttggtgtatcttacatgacataacattatgaaaaatacaatagagtatgtcatatagatgttactctaaactttaaaaaaagactacaaagtgttctatgcataattacattatttaaggggaaaaaggtgttggctgacactattccagctagacagtactgaattgcaaattcatcatttgggcacagatattaatacagcttcctctttattcctatagcattcatttgaaatccctgtactccatgtcatttgctacatatgaaacaaattgtcaagtttttaaccacttgtgtagtttaataaaagagattaaaatcattgtcttggaaacatcaggtgtttttcaaaattctattttattatctttcatcaaaattttatctcaagagtaaaacaaagtcatttcccaaactttccttctccttccaccttctattgtaatattttcctaacttattaaaaatgatttatcatactttttcatcaactctttatttcatcacacatacaagaaacacagtattttggtatgagtatatatatttatatatatgcacatttatatgcattcaaatcacagggtataaagtttcctaagagggtctaattagaaattaacctttctttaaagataattttctgttcatttttctaaattttctattttaaacacacatcattttttaaggaattgacaaatgagactaatgtacattccctgtctgacaacacagaacgaaccaggaagaaaggatttatggggcctgaggttatacaattgggggtgctattttaagaaaaataatagaaaattggatacagccttgggaggggcccctcatgtaagtaaggctttaatagtttcttgggaaatcacctctgtatgaagagatgtgttgacatttaatcttttcccagttacattttaaaataaaattgatgctagttatatttctttagagcatttattatttctcaaagacaaccttttatttaatgcagattagagagttaaaagaatttataatggtaggaatttgacatttctgcctttcattctgaaaagatacattgattaaagtgatgtcaaactcagttaatggaggcggtgcagttatttgaaatatacagggtatataatttgaaggcacgccaaatcacaatgacaaggaataatgatgaccttggtttatttttatacagtacattcaggttttgattggattcagagagaggcaatggttttctttctcacaaagtcctgctatagtcctaggaggtttgtgttctgttatcaaggcagttggttcgtattggaatattttctggggaaggtcatgggctgcagtgtgggaaataaacgtttttattaaatgcaaccaggtttcatgaaaatatttccccttgtagagtgtgctcaatgcagtatactgatcttcaaaaaacaaacaaaccaagcaaataaatagtttgtagtcttcaccttttccctacgtaaaacatctattagttagacttccttggggtttcatgctataaaatattgacatatgtttggagttctgaagtttcattttaatacagatatcaaagttaaaatggcaacaccatgggataatttattattttaccaagtttggagggttttttctatttatgtcacttatagaattgtccctaaaatccttgcaaaatttcaagctccctctacttaatactaaaagtgaatgtgtcttccagagattctgataaccccttcgaatgggagagtaactctgctatttgtgaatcactcctatactaaatatagttccaagattaaaagctaaaatgattttgtttattttttcatgaaattttttcatgaaaggcttgatagtataaaaagtctgtttccctcatatattacagcatattatagcattcaatgtgccttcttaaaccagatggctcctctagagattatgaaatactttaacacccagggcatagcctttctgtttccccattcaagattacttccttgaatatggcccaacaaaaagaccaaaaaaatacatttggctccagcgttttaagggcatataaattttcttaagcacaattctgataggcagcagacaaatgagaatgaggaagggaaatggctctgctgtcttatgcttaaaagtgtcctcatatagagagaaacaacacaccctggggcctttcggagggtagagggttggaggaggaagaggatcaggaaaagcaactaatgggtactaggcttgatacctgggtgatgaaataatctgtacagcaaacccctatggcacaagtttacctatgtaacaaacctgcacttgtagccctgaacttaaaagttaaaaaaaaataaaataaaaagagtcctcatctcacggccatacaacctctacctcattcccattaaaaacacaaagatcagtactccctcttttatagctcacatcttctgtttaggctgccattttaagggataatttctattcaactctgagctcgatctttattttaatctgatatcactcgttcaaaatacttgggaatttcagtaggcaacggaacacacagagcaattttctggaggcctacaacctctgaaggtgactttgcgtagtatatgtaatgatagtaagccctgagaaaaccaatgttcttagtagtctggatttggtttagaaatcaatgtattcctgctttcttttgtgatcttttgccttctccctcaatgcctcactttcactctgtcattatgaaccccattcctcactaatgggaactgggggagaatggacaatgatcctttaattgaaatggagttgtcatttccttgccatgctgataaaatgttgttgctgttgttgtttgttgttgttcttaaatgactctttcagaatttttaactcagtattttgattacataccattttaagaaaataattgtccataaattaaaaatgctagcaaattgatgaattgattttctcatgccaatttggaaatctgaaatatatctaagactggtgaataatatgtaggtctaattgccatttgaataaaagaatctgaggaagagctttgcctttatttttgtttattattcattttagtttagttatttattttagtagaaaaatgtggttgtgtcaacgaagaggaggtacattaaaatgcattattaaagccaatgcttatccatgtaatgaaatgagaatgtagatggcttaatgggttttggagaggattaagataattttaaagaaacttcaaaaaatcagatgctcgaatcatgatgttttttgtttatatttaataaatatgaaaaccatacatgggcatatcaacaatgaggaattcacatatatatcacgaagtctcttgctaatttgtcaacttttaaatgtgttgtcttcactatcatgaaaattttgatttttaaaaaaggtcagtgttagctgagcacaattaccattacggtgtcccatattatttccaattatgggcaaataaaatgcttaccctttaaatgtttttaccctcttcttggcttttgttttgttttgttttaaagcgttctcccttcttccactctgcttttggctaagactgtcatggaatcaggactataaaagggcataaacatcagtagcttttttctcattcctggcactcatctttatttgcactcaacttgtctcttcctttatcagattacggttgcaatagtaccttagcctgagctaagtgctgacttaaagggcaagggagtcagtacactgttacaagtgcagattttagccttggaagctgtgtgaggaaaaattaaagaaataagaaagaaaaatcacaaaatcagaatggcccacgtattttcatcaaaggcaaattgagtaattcctttttatgttggtgcttaagaacgatgtattagaaataaattggtgactaagtgaacaaaatattaataaactagttgagtaagtgaaaaaataataatctgtaaaaatgatgaatcccaatgactcacatgttgcaaaataactaggaagcaaaagggaaattagactttaaagagcgtaatcagatgcaagaaatgttggcttgtaggtggttaactaaaatcgcttacgggaagctcagacagctggggaatcctgatttagtagacgctgaagggcagggcatgagccatgtgaacagctgctgaagagctagaggattcctttggattaggtgtacacaccccgtctctaatgggctgtcagagagcaccaagtgttatcacagaggttcactttgctcaagcctatggcttttgcagtgttttactttaaatgtctgaaaatggattggctctcaaaataaatccaaaaataaaagtatcaaaataagtgactctctaaaacttgtattgtgtggttttgggtgaccacagtttaaagaagggacttacagctgatgatttgttatccatttattgattcatttgtccatgtaacaaatacacatattgagtgcccattttgtgccaggtactgtgctatgctctggcgatagtattctaaacaagtgaactcaaagagagactagcatttcaaggaggatgtgcatattaaatacacacacacgcaaactacttgcattggagataagggctatagaataaagcacacattgtaataagaatgtataatagggagagttagaccagtcttcgaaattggggaaatacttctgagaaaaaaaaaatattcaaagcaaggcaaagaagaatgaggttagagtatagttgtccaaaagaaaagagggagcaaaaatgtccctgtcagagggagcaatgtttctgaatgtggaaaatggtatggagaaagatctaaaacaagtacagctttcctagagtacagtgagggcagaaaagtgtggaacaagcttgcatctgaatggccgactggggtccaatcattcagagccttgaaggttatagaaattatttttctctttatactaagatcaatggacagccttatgggtttcaggtagaaaactgatgtaaacatatttgtattttttaagactatcactctgttttgtgtgaaagagattggcaagtgcctagggtagatgaaggactatcaatctgaagcaattacggtagctcatccaaaagaaggtgatttggactagaatggggacagtggagatgaaagaagtaaatctattcaagatttgtatatgagatagaatcaataggaattggtgttgtattgcatgctgtgtgctccatgaaatgcacacctgggtggataatggtgccatttgcaaggagattggaagggaaattggaacaacaggaaggattaggggtgtggatgctaaggtgtttgttttgttttgtatttttatgtagcgcgtgggtattgtgcctagaaatgaagtcattattagggatttaaatatgcaactcatggagtggatgagaccagctagaaagataatagagtgtgaagaggagatcggaaattcaataaagaagacaaaagcactaaaaaaaaaaaatcagagaagacacatctagaaaaaatgatgaaattctaaggaaaataatatttccataaagaggtctgttcctttcgatctccaatttaatgacttcatgaatgaggatcccacttttagcattaggtgtcttggtttccacagtctctaccatctatttacccctaatttcctcccatattgctatttctgtgaatattaccaaaatgttgccttagtagaaaagcttcaataaatatttaaattgtataacgtattcagctttttcctgtactctgcacttcctaaaaataccttcttcggaaaccccatttcaactgactactgtataatgaaatgagccttcagtgtaaaacatttatcatagtctcaatttcaattgctcagtcagaattgttgagtaatatgaaaaatcatcctttagagaatacagaattgcatagttatgacaaggtaagtttgcactttatttaatgctagtttagttaatatagatgcttattggagaaatgtctaaaaattctggaggaccgttagtgaaagtgattatcccaatatctgcaaaaatggtaaaaatacctagaaaacattgacatttcagtttaaataaagccagaatcacaataaagagatagaaggcatttgagtaattcaatctaatcatggatgaatgtaatgtacttatcagttagctttggaggaagtaagactcgatagaatagtaatatgatattgagcaactttttttaacattaggtttttaattgcttataactcaacattgttgaacacctatgttctctttgctttttatgagacagcaactctaagtcagagaacagatacacacacatatgtatatgcgtacaactactataaaatatcaagaaagttataaagcatggtacaaatcaatcataaatgattacttatgaatagtgtgattatggacattctcattgaagaatccatttttataaataggcataagagtatggacatacagagatgtgaattagagaatgattgcaagaagcagtgaggcaaaaaggattaatgaaacattgatctgtcttacatacacagctattgacagtaccttgtgtgtgcatagcactattctagattcacctaatcttcaatgataatactgtatttaccatttaacaagcctgtaataagtgtcaggcacttctctgattacatcacatacatatgtgataagttccatattaactctagaaggtggggaaacataatcatctaaatttaccagatgaatatgtagaggtacagggagattaagtaatttgcttaaggtagctcagctggtacgtggtagagtcaggattttaatggtggcagcatgacagtaggattaaagattcttaaccagtcagttgtcacgatctctcagattttaatagaattctaaaaaggatagaacaaaatataaaatggcaggaatcatagtatcttctaacaagaactagacatgtcccattgaggatgctctttaaaaataaaacccattaaaattttgggttgtttactcaaagcctatagacattggcatattatattttcttagataaaaactgagatatcctaaataactcatgcccattctctagacttgcatagggagctgtctatgataatatccataacagttatcttgtttcacaattttattactatctcactcttcttactttgtgaagatgaaaaagatcaaaaataaaactaatgcagccctggtttgtttgtaatcatctacagttagccatccttagagtggtctcactagttgttcttttagagtttatttcagttatgtacaggcaactgtgctacatgaacaaaaagctaagaactgggctaacctgaacatgatttagtattgtaaaaaaatggtttacatagattaacgtgccatactattctgaatagtacttggcataaacagtaggttatttaagttactataattactgttgcctttttacataaactaatttttctcttatcttcattatgttagtcatccacagtgtgatatttagttgcatacattcatatagtgtacactgtacaattctagagtgtaccagtaacgtggactattaatattatgctatgaggtaaatgacacccctggagttaagcaatgtgcactctgtacgataacgtcaacattggcattctcatatatatgattagaaataatactgagtttctctgacttcacaagcaattttattctctcatctcataaagaggtaatgaatgcacacatatctacatatttaaaaataatgtcagagatcgtgatggaacagaattattcaagatgtataaatgagggtgggaggcaaagggaagtcagaaatactccccaataatttatttcaaattaaaagcctattggttattggctggtcgcggtggctcatgcctgtaatcccaacactttgggaggccaaggcgggcagatcacctgaggtcaggaattccagaccagcctggccaacatggtgaaaccacatctctactaaaatacaaaaattagccagacgtggtggcgtgcacctgtaatcccagctactcaggaggctgtggcaggagaatcacttgagcccgggaggtggaagttgcagtgagcggagatctcgccactgtactccagcctgggtgaaagagtgagactctgtctcaaaaaaaaaaaaaaaaaaaaaaaagtctattgattatcatgtgcgtttccatggtatcaattgtttagtattgtccagtaactaactagtatataaaactatcaggataatataaattttaacatttatttaaaatgcatcttcttaactgtaaggttattgatctttggataagctatagaaataagccttaattcagaaatatatttcggagacccagtaggttaatttgtagcactactctttaatattaaatatacaaatatacattgtttttataacttactgctataatgacactaagatgtgtgattatataaaaataagaaattgttagaatttattttattttaatcaatgctgatccatttttctagtgtatgagattagatgaggttgtatgagataccacttttctaggaaaaaagaaagtctttatgacagtgtgatgaatgaagtaaattagctcatttctttcaatattactagtgtgcatagatcttctctttttgtctttctgtctatcatacatacacagaggcacacatacatacacattacttggaaattaagtggtttacgtatgaaagtttttggctttactgataagatcagtaacatgataaataatacaacactgaatacatttttccatttgaaaagtgtaaagaacactacaacacggttgggaaaaaaaaacaacttattatattcaaatgtcattcccaattgtaacaaacatataattatttatttcttaattaagaagctattaataatagtactttaatattcaacattagcagtaactttgttggtttcttttttgataatttgtttaagaaaattagattataaattctgttatggtaaaaatacaaaaataaagcaaagtattatcttctttctatctcttatatgcatcagttggacaagatattgagattctcttttcttttaattgcatgctttcattatttttctattcaagcttcaccctgctaagttcaagtgaagtagaggacttcatgtctctagaaccaattaatgaaatttcttcgtctttcttgaacttgcagaaggtcaatagtgaccattttctcccttcttaaaaatgttgtcgtctttaagatctgtgcactgtcctctcatggcttcactactactttggagggtgtttgtattcagtctgcattgcaggctgatcctctcttctcagcctttaaaaattaggtttccttgggatctagtcctagcataattctcttctcataatgatctcttcctcgatcattgcacttatgtccacagctttattaacacttatatacagataactaaccaagttatacctctagcttagatttctccaatgaattccagaactgtgatttcaactgcctgggtggcatctccattcttatgtgatagtcacctccctctaaatgccctaaacagaactttctcttcaccgcacaaaacctgcttccttctcattgtttttcttatcattgaatggtgcaaccattcacccagtttcacaagccagaaacatatctcatccttgaaactctgatcttttttacccagttatttctaagtcattgccagtcactgtgggttttatcctctaatatattttcatccacttctctttatctcctctaccatcatcctagcgcaatatattttctctcactaggaatacagcagcctttcctttccagtttctctgcattctctttcgtattcttgataatccactctctaaacttcatgcagccaattaaattcgaagataccaccacttgttaaatcatgttagtagtttctcttggttgctaggaaagccaaacaaaacaaaacaaaacacatttaaaaatcaaagtctagacactgcctacctctcctatctcatttcccatcatgtttcctttgcctcgcccccttactggctttctttttgttccctgactaggtatagctttttttttttatctacagtacttttgtgtatgcttttctatttgtctagaacctccccgtttccccttttttaccttgatgacaccattttccacctacaagcttacctctggatagacatcaaaatcccctaagtacatcaaattcctctaccacgtaacatctgttcataacacatagcactgttatgattccatatgtatgtacgtgactaattaatacttgccagtcggattatgtggtaagttctatgaaccaagacacctcaactgttcttgctcaccactttattacctggaaccaaacacattaggtttccccatatatatttttaaataagttacttgatgtgtaatgctttaatgaacataattacagatgtttacatataatatgttataataatgatattttgattgcattttatgaaaattttatatgacaaagcactttcattttggttaaagcttcatatataaatatataataaagatttgctttttgtcattgggtgctgttcccttttttgatttcccatactgcttttcacttgtggttcttgattttgttttttactgtttttaacccatgtcctttttctttccttaatctatctttgtaaagtctcaaagaactagtatctagaatatataaatatcactcaaaactgagcactaaaaccacaaataatctagtggaaaaaaatgtgggaaaagccttaatagacatttcactgaagaggatatacagatggtaaagaaatgcataaaaagatgttcagcttcactagccattaaagaaatgcaaattaacactacaatgagttatcactatacacctatcagaatggctaaaattaaaaaaagaaaaacagtgacaacactgaaagctaacagggatgcaaaggaactgggtctttctaatattgctgatgggaatgtaaaatggtacaaccattctagaaaacagtttaggagtttcttctaaaattaaacatgcagtcaccatacagcccagcaattgtactcttgatatttatcccagaaaattgatgtttatgttcacccaaaaaccttgacatgaatgcagtagctagaaacaagaaacagctcaagtatccatcaatgagtgactgttaaacaaactgttatatactcataccactaaatactacacaacaatttaaaggaatgaactactgatactcaatattcacaactccaatggatgtcaagagcaccatattgagcaaaaaaaagtcaaaggttaaatactgtgttatttcttgtatataacattactgaaatataattatagatattaagaacagatattgatattaagaacagatattggttgccagaggtcaggaataaggcagagggtatgctatataatggtgccacaatggagccttgtggtgatggacctgctcaatattttgattgtggtgtttgttacacaaagctacacttgataatgtcgaatagagcttcacacacaaacacacacacacacacaccagagtcacacaagtgcatacttgtctatctggtaaagcccgaataagctctatgaattatagcaataatttcccagtttttatattgtactatagttatacatggtatcaacattgggagaggtaaagtgaagtttgcacaagacattgttgcatatttctttgcgacttcctgtgagtctataatgattgcaaaataaaaatttgaaaaatacagcattagacctttaataagctcttggttttctgaaggctagggtatcatcaccaaacctaatcgaggataagtcttgtaaattaataagtctatcactcaaggtacaaaggatggtttaatgctaatctgctagaatgcaatccatttctattatatgggaacgtgcatcactgattgaataaaatatcatgatgatggaggccgtattctatatgtcctactttgtaaggtgttgtgtttcaggttgtttatgaccaaaaaccctatatgacaagcgctagaagttatgctggtccacgggcatggtaacttgacaatgcctgagactacctgggttttaaacttgcctctacctacaaaggcaagtaatcctggacaagccaatatttatttaactagtattaattgagagcctaccatatttctggcactgagctgagcatgtctactactgtcctcaagaggaaattaggaaaaataatgccccttcacaagcttacttattgttggctttaaaagggggatatataaagtttcttggtgagggtcaaagtgttgagaataatttttctttgtattattttaactattattgttaatcacaaataactaatgtatataactctaaaagataaatgtacatttggataccaacttgtataaacagatacatagatcaaaagactacctctgattttatgtttgtgcgtgtgtgaatgatctccttgctttcaatctggtcttcagaaaatcccaccttgtaattgctgcccccgttgagtttctaaaacaaataagattgtgtgcctccagcttaacgtcctttagagaatcttctagcttcagggtaaaatccaaggtcctaacgtacaaggtctttcacagtatggcatctgctcatgtctctcacctcctgatctgctgttccccaccaggaacacttctgtctagatataaaattactttggttcagcaaataaaataactttggttcatgtaattttgtgtctatgacttgttcccacttcttggaatgttctcccaaaaaccactatcaccatgtctcttccaccaatgactattaatattatttttatctttccttatagaatattgtttaaaagaattccttactaccctaggtcagaaaatggggccccaatatgtattcttattgtaaactcactatggataattctagacaagcaattatatcccctattttagctgtcagtttgcttctcggcttctgactcactctcttgctccttgaggagatagcctgtgcttattatatgtggattaattgtgcctaacagcttgtaggtacacaaatgaatgactacacagcatttatctgactattgtttagccattacatcactgtatacatatttgaaactcaggcatcattcagattggaaaagccttatgaatactggcatgcattattttgtacacacacacacacacacacacacacacacacacaaaatagaacaggatgggataatcctaagtagatacttttttgtccagtgtactcaatatattgtaaaaattataaatcttagactaaaatgttggttgcttaatttggatgattcatataatctgtcgtgtttttggttatctgtgtactttgttttctctttctttcttagtctcaaaggaaatgtccaagttaaaaaagagccccaatttgtggggattcctttgaggagttacaaagctgagatatcttaggagatgccaaattgatgcaaagtggtggagaggtgagcagagtagaaatttggagaatcacttctgctcctatagtgcatgcatgccagggctgctgtcctttgaggtgggcacaggagctctaagtccagtgggtgtctgaggacagattactgagaaagtgaatggttggcttggactacctcaaagacaagtgtttgctcctgcttgagctattgttggaggtttcctgaaggagacttagaacggaatgtccattccagagagtattcagtttcagtttgctgcattcctaagcttattttccaccctgggagctggccacaatgattggaaatctttcatctgttttaatctgggattgagctcatttataaaaggaaacttagtgtctggataaatatgtgtgcacaagcatggagccccatacaagtatgcccaaattcaaggtgagaaatgtttattgcatgactcaaatacatggaattgaatggactctgaaaacaaaaataggatctacagagccagtctaacaacctattcatatttattatttttgcacttaaatgtttgtaatattttattgaccagtgaatatgaactatattttgtatattacgttaacatattattcatgtaataatgaatttttaaaaactggtgtcttgaaccctttcaatttccaaagtattacagaaatccacagatctggtatgcacaggcattttatgagaaaacttagcttgagtgatatcattaatttactgaagtagtaggccctctgacctgcttttataataaaattaagtttctgtaaactaataagaccatagtaactttttctttaatattttatctttgaggagatttgttaaagaggcttgtatgtgacatgacaatctattttgacttataaaatttcaaccaaagaaaagatgcgatatagtatctttgttcttatctatgacaatttttatgatgatagttccataattaaattttttcttaatgaaagtgtatattattgtattatcttcaactaaattagatcatataacccaattttgatctccgtatgccaaaagcagagaattgaccagccagaaaaccatccaggccttatataatatattgtgcctagatgaaagcttataagcattcttctgcctggggctcacattgtagaaatgtggtgtgcaattttgaaagttgaaaatatagactctgattgagaaatggaaaagagtagagttctaattcatgacatctagaaatcaagttctaccactgaaaaattaatttgcatatattcattatcttttatagtgaatgataatgataataaagacaataaagataatatacatataattggttttataaaaactatggcaaaaaatatattaccattctcacttgtcagatgaggtaactgagtctatattatttgaaatataactttaaaaattatattatctccgctactagattatatactcctggatgccgcaaaccacatcttctatgtgtttatattctcatagagttttgaatatttccttgtactaggaagaagttttataaatgtgttttgaattaattaatatccaaaagtgatggaaagaattataagttacttataaatttcttttgtttcaaaccattagatgatgacacttaattttttgggtataatatgatatggaaagactctcagataacttcaaaaactagaattatgcatacatacactcagatttctaaaaataacatgctatcaattcatcctgcctgccaggtatacaattcatttgagttttgcatgcgcgtttcaattgttcacattaaactgtattcatagatacaaattcacttttggaatcttgggtacttaaacaaaaacatagcctttctaatagaagtataaaaaggatactaattgatgaatataccaagtatctttccaattgcaggaaaccattaaaattgtgtctatacactgtatctcttttatcaaagactgtaacaaaatcaattgctatacatattgaaatatttatgtatctggtatgattacattagcttcagagtggttccaaatttaaattcccattggagaaaaatggagtgagaaatttgtacataagagagaagaaatgttttcttttttttgagacagagtctcgctctgttgcccaggctggaatgcagttgtgtgatctcggctcactgcaaccttcacctcctgagttcaagcgattctcctgtctcagcctcctgagtaactgggattacaggcgggtcccaccatgcccgcctaatttttatatttttagtagagacggggttttgccatgttggccaggctggtcttgaacttctgacctcaggtgatctgcccacctcagcctcccaaagtgctgggtttataggtgtgagccaccacacccagccgagagaagaaattttacagttagaatttatttggacacattttagaaatttttttcctgtaaaactcaagtttcatagtgtgtacgtgaatgcatctgtgtgagtgaacacctgtgtatttgtgtgctataaaaagatgaacacaggaatctaatagcataagtcgcaaggtaagagtattgtccaactaaaatagctaacttcagaggtatgaattactttttgttggtgggtatgattttaacattcccttgaatttattattgtaatatttgccactaaaagaaaaaaatcatggcttagaaataaatttaaagtaaccaagatcattgctatataaaccagaatttaaattgagggtttttgaaccattagggtatatttcccctctggcttaaatttgaaaactgatgaaattttagatctcagcacatttaatatgtctaaacaatactcatttgactgcaaaacctgtatatgtaatttccaaggcccagaagttcagtatttgaaattaaattgttgcatattactgagaaatattatcttaaagcatctgctccttctgctgttctaagttaggtgtgtatttctcgttagtgctcagtcgatgagtacaaataggcatgcagcatgagagcagagcattcatttcattgactgcaattactaacatgatttttgacatcttattcattgggagagtgtcttttaatgttaatttgaatgaatgggaatactttcacattcttaatgaatctgctcatagagtaaaataaaacatgactgttatgctttgaagatcaagaatcttcttttacacaaaagggtaaaaaaggccaaagaaggtgaagtgacactcttcatgctagttccaacacgagtattttgatgaacaagaaaaaaagccttctttagatgtaggtgaactgggtgatttggcattccttcctctgaattcccagggtattttgcctgtttttctttaactgcatgcaattcttgtcctttatccactgtttacaggtctgtttctcacaataggcggtgagtttatttacacagtgactgctgttacatatcacatgtactaagtctctagtgattgttgcttaacgatgactgaattgataggtcctagcatggctgatctctcacattattcttgtttggtttgggtttgggtatgaatggtggaaagagaaatggctggctctgagcaacatattacaatgggtttctagcatctactcctcacctagtactagcttagacagtgagcaaaataaaaccataaagcaggccaggcatggtggctcatgcaagtaatcccaacactttgggaggccaaggcgggaagatcacttgaggccaggagttcgagaccagcctggccaacatggtgtaaccccgtctctactaaaaagacaaacattagctggacgtggtggtgcacacgtgtaatcccagctgcttgggaggctgaggcagaagaatccgttgaacccaggaggcagaggttgcagtgagccaagttcgtgccactgcactccagcctaggtgacagagcgagactctatctcaaaaaaaacgaaaaaaaagtaaaagtaaaaaagctaagaaagcaaactatgtgttgtcaagaagtgtttatttttgcatcttgaatttttaaaggaggaggttcagatctatttgttagatgacacagggtttgtgaaaactcttgcagaccaatgaaatcagaacatacaggcacaccaagtgcagattgtgtttagagccactgttctaaaagcaggtgtaagagggttgcagttatatcccagataagagccttagggcattaggaatgaaaaagacaaaatgcaaacaaaagatatttagatatttaattagtaaaacttatttgcgcgggtaatgaggagagagacaaaaatagtagagagcaaatcatcaatactgacttcctgatttcttactagggcagtataggtgtacactatatatatatatataatattatatattatatatatatatataatattatatattatatatatatataatattatatattatatatatatataatattatatatataatattatatattatataatatataatattatatattatatatatatatataatattatatattatatattagtactacttccttttataaattggacagaaagcttatatgtatagaaagaaagatcaggctgggcgcggtggctcacgcctgtaatcccagcactttgggaggccgaggcgggtggatcatgaggtcaggagatcgagaccatcctggctaacaaggtgaaaccccgtctctactaaaaatacaaaaaattagccgggcgcggtggcgggcgcctgtggtcccagctactcgggaggctgaggcaggagaatggcgtgaacccgggaagcggagcttgcagtgagccgagattgcgccactgcagtccgcagtccggcctgggcgacagagcgagactccgtctcaaaaaaaaaaaaaaaaaaaaaaagaaagaaagatcaatattttttcaaatgtccagccaattgtttaagtaagttaaggtatgtaatctaaacttataatttaagtttaaagaaaaacattagaccaaatatttagccattttgatgtagccaagtttatgcttcaggagagttgcatagttatgaattgagctcacagaaatacaaatacacacgtcatcatagtgtgatatccagcatagatggggggcagttatcataaatcctgtcctaggctgggtttggaatgtgagacagattttataataataatatttcatctacataaaacagtccatttcctggactataaggatcatgataccatttgtttatcatggctacaaacagaacaggaagtagtatccttcaacagagaagataaattataacagtcattatttagaatatttgcaattcctttgtgtagggctattctttgttagctgaaataaagctctctgccttgattacagttatcattttgtgaaaatattgaatgagtttagattcctaaaggaaattagaagttgagtaaaatgtacattcacttagaaatttccttgcagtgaaagatgctgattactataaatgaagacagggaaatttcattcatttaaagagattactacaggtgacaagtttaaaattagccttaacttaaaagttggaaaatattttttcctgctagagactaatgccaactccgtgatgtatgtaaggtcatgttatcaggacccagcttattgctgctacctcctctcctacccttctcctcatctcttactcctaaccctttagccaaaggctcctatgtgcgggcccccaaactaccatgctttcgtgttgtcagggataagtcttcctgaaattaccctccttctccttaccaatcacttaattaattaaagcctggtttccacttcatctcaggaaaaattatttcctaacccctctcaccaatctccattgactccgccaatggaggttaggtatggttttaaagtgttctcatagcataagttcatcaaaatgcacaatatctttcaccatattttgtcaatttatttactttaatatgagaatacaaatatcttggcatgtttatcagtgttacacggatactgttattttatcatcatgtttcccacctctcccccatacctagagatgagcataaggcttaatatataaagttatttggttaatgctttttttgaataaacaaatacatatctaagggcatgtgagcaacagagttcattgtaacactatgcttacagttaatcatctttttgttattgttctagcagcaagaaggatatatatctatatatatatacaaaggggagaatgagaatgatctgaattcaaatataaaacattacaaatgaataaggaatgtattattttgctagcattgccataacaaaataccacagtagactgggtttcttaaacagaaatttattttctccacagtagtaaaggctaggtataatcagggctgatttcttctgaagcctccctccttagtttgcagaggctgccctctccatctgtcttctcatggtctttcctctgttcctgtctgtgttctaatctcatctttttataaggatactaatcagattggattagagctcaccttagtgacctcatttaaccttaaatacctctttaaagaccctatctccaactacagtcacattctgagacaatgggggttaggacttcaacagacgaatttgggaaaggggcaatttagcccataacaaggagccctgtcaaataaaacagctttgagagcaaacaaaaattggcatctgagtgaaatatgtgggaagaggaaaataacttggggctttgctgttctcttcccactcttcctgtgacccgactggttccctgggaaatggtctttggatccccactgctgcttaagagtctgttttttttcccctgagttactgaggactgctgtcagtatgattgtagtgcaaattgatcctttgtgggaagtacaatagcaactggtaaccacaaagtaccagagggcaaaagaactgtagacgggtaaataaaaggtgtccgaaaagagcaaagggctggaagaatgggaaaatggagaaagtaagatatgcattgagaagactgatgattttttaaaatagtagatgttagatagatgatgagagagacagagagagagagagagagagagatggttaaaggaaaactggtatttggtctgcagttttgctgtttcaccagcttaacaccctacagtgaataacaaggtcatagatcatcacaactgcagaaaacctggagaatattttccatttcctcattatatagatgtggaaagtgagactccagttctcagaaacagttagatacaaaactaagacccagctagttctcagccagtgattttcatatcataccacacgctatacagttgtaggtttagaaaaaatctatggtataagaggaccatgtagtaccttacaatgcttctgtaatacccacagcatcataaagagtaataaatttaattattgcaacttaatgattcaacaattgtatatgtatatacgtaattatacatatatatgtgtatgtataaaatctaccaatacatatgtaatgcacatgtataaaatctaccaattttctatatatgcagaaaacaacaacaacaaacagtattagagaaaaccagggaattaagtcaaaatcatcactcccagacctgaaataaatttcaaaagctcttcgttactggtcctttatttgtccttcctacctcattttttgccccactcatataccacacattgcaactatgctaaactaccttattttttttagaaaaggacatcctcctcatacctacatttgtacatttcctttttatttgcttttttcctctcctgttgccacagtaaattcctaagttttctctttaaggatctgtggcctgctttggatacagttgagtgtagtgatattgtgccttgcacatatctctagaacaaaagttattctgttatagaaattacttatttactatcacttaagatcatttattaccatttactatcatactctaattcacagaaggcaaaaaataaacccttgaatggcaagaaatgtttaggcaatgttgggcaaattgtttatgaatagtgattgcaattaacatagagcttcatacttactggattaaatattgatacttttgagtcatatctctactcttagcaataatattggtgaatattctgtgctgtaagcaatgtaaatcataaaaacattctaatgtgtatatgggtattgaatattcaatgatattaaatcaatgttcaattcatatagatgattcttttggaaattaagaaatggatcccattttaatgagttttccccaacataaactatactttgttaagttcaacttgacaatttacaacgctcacatagctttcagatgtatacttaagatatatggaaatgaaaagcaaaatgttgtgaacaggaggtgacaagatattttaaatttaatcatcatatcttttataattaaccttttaaaacatttaattggcattattgttagaaaactttagctctggaagctaaatctttagaattgttgacttgtagacaagtcaaatatccaaaataaaatttcacccatcattagcagtagatgtatctagggtgaaattacacgctggattacttcaatattcttatatttacatttttatttttttcaaagtttctccagtgagcattttattgtgaaaatattaattatattttaaacttatttttagtttaagatgagaagatagtctttggggtagataaatacttttaaatctttcatttagaagttcctggactaatattatccaggtcccacttccttaaaaaaacctaatgtaacctttcccatataagcattgactgctatttcttgtttcacaacatttatgtggtatgtctatgcctatggtattgaatatatatttgaactctgctggcctattcccatctctcacagatcccaagacaatagagatcatgtcttacccatctttgtatctcttacagaaaatagatctcaaattctacagaagatattgaattgagagtttgagatgttagaataagaaaaggcagtgaaaggagagcctacatgtagcctaggccagatttacaaaagcagtagctcagaatgagatagggattcaacaaggagaaccaaattatttggtagtaagttgttgctaaattgtgggagatgaggaaaagggaataatgatagcagactccctgatattaatcccccaagagtgctctatggcacagtaattattcattatgggccccctctgtttggccccacgcccccaaaaaagacttctttagtcataaaactgaggggaatactacatactaaatccccttagagtttctcaatgtaatgcatatgcaaagatgctctggaatcctgcaggaaagacagctgtttaacttttaacctagtttcccaaactcatttcaccatggaacttctttaacatgcagtcaataaatgcccatttatctaatgtttaatgaagcatatgttggaattcttaaaattgttaatagctaatcaccgtgaggaactggtgagatgatggtaacattaacagaagtagagaaaccaggaataggatcaaaattggaggggaaggggaaaagggccttttgttttgagacatcaacttagaattgttgatgggctatccaggtgggtagataataaaagtttttgtgggggaggactaaaactaaagagttagacttaagagagaaatacttgagaatcacttacatggagatagatgatagttgaagttaaagaagagaacgagatttctaacggagggaatacactatcaaggaaaggattagagaaccctgggggagtgtgaatatttgtgcctcatttaattttcagaaccagatcatgaggaaagaatacttcccattttagagattaaaaaacaaaaccgaagcacagtgcttaagtaactttctcaaggccatataactaataagtggcagatatgagattttgagccctactctaaaacttgctcctcaatttgaatgtttacatatttatgtaaataatatattttacaatattaaaaacgtttttgtagagatacaataaccatataattttacaggattgtcttttttatttacgtttttctttggagtataatacatttttaattattggcctgagaagaagatacaatagattatttttggcaaatggtgcactcattcatgagagacactgtattttctaaagcaggctgatctctgcataatactggctccctgaaaataaatccttgctgggccgggcgcggtggctcacatctgtaatcccagcactttgggaggccgaggtgggagcatcacgaggtcaggagttcgagaccagcctgaccaacatggtgaaaccccatctctagtaaaaatacaaaaattagccgggcgtggtggtgcatgcctgtaatcccagctactcaggaggctgaggcaggagaatcgcttgaacccaggaggtggaggttgcggtgagccaagatcgtgccatggcactccagcctgggcgacagagcgagactctgtctcaaaaaaaaaaaaaaaaaaaaagaaagaaaaaataaatccttgcaatttatctgccatattgaatttgttctggaataatggggataaaatcaaaataggaaataaagtatcaattttattccactattattttatttattattttcatcttagtcatatggaattatatttataggaacatgttaaaatgcattttcaagataattattgcacacaatttaaacaattgttttgagtgactttttgtagaggtagaacagttctgtaaaattaaggtttggctttgctttgtttgacctagattccctattaatttcaaaataaatgtgccttatatttcaaaatcggatttcgtatatgaaagctcatgtcagttcacaacaaaaaaaaatcattaaaaaagaatagtgcgttattttattactgttttgatagcaatacctgaggataccgtaaatgtgtgcatgtacttttgtttacaaataaaaaacagttatgagaagacaaaaaaatctaatgtagaataatttattccactaaaacccagctttcctcatggaaatcatgcaacacctagtgagattatgctagcacatagggaaatttcacaaatgcacattcttagacatattaaccttctggatcagcattcaacaaaggtaaaataatgtacgctattgatatcagactccttagctccctattctggctcccttttaactatcaaaacacagtaatctgtgttttccttctttgtacatcagttattgtacctgccactctttataagcattcacttttctcttgtttttaagcacagtggtagcaatggccatgacttagaggcttaatgaaatgaaggacagattataaacaaattaaacccacactgctttctttatagaagcagctgcagagtgttctgaggtttttttttttccttgttgagtaaaggaactaataaggaaaatttcatggcttcaaggtctagagataagaaatgaaagttgtaacaggagaggagctgggaaaagcacagaaatgtagatttcgcggatcatgatgaaagccacaggtgacttggtgaccacagaaatgagaacacagggttgggtgtctaggcaggaagttgggaggctggtggagtcctggttcaactctaaagtctcagttatctcagcacatgctcttgtggtgctgctgagatttggctgattgcctaccccaaacctaaaaatagccgagcctcattcttttgtagtggcagccagaggcgcagctgtgtggggactggctatctttttccttagctttgacaaatagctgagagttggtgggcttgagtgtgcacctgttgagacagaaagtgctgagtttagttgacaacactgctgaaggtaatttcacactttcattccaattgatcaccgaaacttagaaaaattttctccttttctaaatccttctccttgcccatgaatatatacatacatatatttttctcgaactgtttgagagtgattgttaccaaaggcaattgtttttaaatcagaataacaaatctcctgtttgagtggctaactcaaattttattttcttatttaatttagtagaatttaaaagatttaaaatagttttgaaattaggaaataatatttttattcccataagtctaaaggtacaatctagcccattacatcactataaaaaatcatctccatatttattagattacaggatattccgctttaaactagaatttgcgttgcatacatttttgcagaaaaactcattcttaattttttctaaaacagtagattggatatgtgttaaaggttcatgttctagtacttctttaaatgcttattgtcagctttataaaatcattttatcacaaaaagttagttttctgtaggcttattttccttgataggattccttctcttacaaactggttatatgaattaaaatgtaaatgttagtgaattgtcatatcttgtaaatatactagggtagaactgatatctttatgcaaattagaaaaatattttacagtatcagttatggagttttttttctactcttcctttttctttgttaatattggcatgtgatgaaatcactactttataagtttgctactttgattaagactcagaaatcagagtggctgggtgtggtggctcatgcctataatgccagtactttgggaggccaaggagagagaggatcccttgagcccaggagttcaagaccaccctggacaacagagtgagacctcatctctacaaaaaaaaaatgaaaagaaatgagccaggcatagtgacaacacgcctatagtcccacctactcaggaggctgaggcaggaggatcactggagcctaggaggtcaaggctacagtgagtcatgatctcaccattgcattccaacttgggcaacagagcaagattatgtctcaaaagaaacagatcaatcagagaagtaactttaaatattttaatataaaaaaaggcaacatctcttagcaaataaaaatagcgacgtccttctctttctgtaaatctatccaagacatgagtgctgttatcgattcggtttagggttttgttttgtaatatttttttcccctttcacagcaatacattttggggtatggtttgctgacaatattttccacagtaatcagtggcttagctgtaaatagaggataagtattgcatctggggaatacacattagaaacaattggtatttctggttcatataaaggtggaaaaatacttggccagatgggcacttatttatttattttcctgaccagaaataacaggcaatgtgtgagaaagtgtggaaagcactgggttggccgtcaaaagcaggatcttacaaaggttgaaggaagctaatctgctgagaggttttctttttttaatgactttcacatagtatttttcaaagcctctgtgcattaacactcacgccaaaggaaatgatttgttttttcaagcacttggtcagtgcaatagctccgcagctaataatgacatatggcaaattttgagtacttactttgtgctacgtactgtaataagagctttgtgtatattatgtgagtaaatacttaggacaagcctgtgagagagctattattgttcccattttacagatgaagaattctgagttagaattagactttgaaagtcaaactttctccttccctatcccttgctgttatccaccacatcatgctacctccctgagctcagtgattacctacaatgaggtttaccagcttgtcctatagttacctgtgttataactgccatgttcctgaaataaattaactataaaatggtgcccatcgactgatatagagaccagtcattttttttttatagttttatctggcctggggttatcaagatactaggtttaatagaacttacttccagatttaaatgtctttgttcattcatgaaaatcaattgattggatccaatgattttagatctagacaactgtcagtcatgtaatctaactaactcattgtttaaagaggcaactgaggtgctgaaactttcaataattggattaattttatctttagtcagttatatcattagaacctaggtctctatttcttaatctcaaccaaaatatacatacatacatatatgtgtgtatgtaagcaccatttctgctaatttacaaaaacctagcaaaccagtttaagaaaaaaaaaagtttcctttgctcatgtaacgaaaaagtgaagaggtattacttacttcagatacagttagttttgggatctcaagtgatgtcacctagcccagtacctctctcaccctttctccactgtgttttcaaaggctcttaaaaaaaaaaaaaaaaaaagctcttagacattatctctcgatatgggacccattattagtcttagacttatatcattgtacctcaattccaatagaaaatgaaaacaccattctctccaacagaagacctaggattacttgtaattgactctgaagaaatcacctacacattcctgaatcaatcaacctagttcaggagtacagtgttctgattgggcaggttccatcagacacccactcctggaaccagagccaggtaagttcaacccaaaactgtcagagaggagcaggggtgggtaggccacaacgaacagagatacaacaagacaaacagtgaagaagaagatgaaatgggtagcaggcataataagattataaagtcttgtaggtcccaaactctgtgtgtatgtgtgtgcatgtgtgtgtgcgcgtgtgtgtgagtaaccctcaaaagtatacaagtattgtgcttcctgtaatgacagacacccttctgttgataataatgattcatgtagcccaagaatataagaaagtattctgtttgtaaaataaatatttagaatgggaataaatttgtataaacagaagcatgtttgattttctttaaaaagtgcgtgataaatatgatgatcccaggaggtttgttcgttatttaaatgtttaaacatgtgatatgtctctttcagaataataaatagtagggaatagcaatatagcacttttcggccgggctcagtggctcacgcctgtaatcccagcactttgggaggccaaggtgggcagatcacttcagatcaggagtttgagaccagcctgaccaacatggtgaaaccccatctctactaaaaatacaaaattagccaggcgtggtggtgcacacctgtaatcccagctactcaggaagctgaggcaggagaattgcttgaaccctggagacggaggttgaggtgagatcgtgccattgccctccagcctgggcgacaagagcgaaactccatctcagaggaaaaaaaaaaaaaaagcactttttaaaaatcataatggatttctaagattgtaatagttttggtatgctgattggctttatttttggctacatttattttagaatctctgcattatcaatgaactttcattcaatttcttttctttctttttttttttttgagacggagtctcgctctgtcacccaggctagagtgcagtggcgcgatctcggctcactgcaagctccgcctcccaggttcacgccattctcctgcctcaggctcccgagtagctgggactacaggcgcccgccaccacgcccggctaatttttttgtatttttagtagaaacggggtttcactgcgttagccaggatggtctcgatctcctgacctcgtgatccgcccgcctcggcctcccaaagtgctgagattacagtggtgagccatcgcacccggcccattcaatttctaaattaggcataaaaacaaaattatttcgtaacatttctacaatgacctcctttttctgttaagtttctaattctgaagacccaaattcaattttatatttcagtatctcacactgattattctgatagttacattaaatccctcgtttagaaactgatgcaagttactgttttcaaatgttcatgctttgaaagtacatgtttgtcatctgatttcaaatctgcatggttccatgctgattattttagataacttcaggctgtactccaatttttttctgagagatctctgaagtaagcttttcttactctgttacaattttaatgagatacattctatgtattagagtgtgaaatatctctttaggacaaaatttaatcatagtcagtgctccttatttaaaggctaaaggcatcatcaatttggcaaaaaataaacaacactatctggctgcctgagggtccagtgactgaccttgagttgaaatcccagctgcctgcatcatgtgaccatcaacattctgtttttatcccagtggtaataaataccttatactcaaaaagacaagagcaactcagaagagagatttggtacttttcaaagaaacgcagcagtaaaagttgcatgatgcttttcatttcaaagcaggcaaacagagctttattatggcagagcagtccaatttaattttcacttgtgtgatgaaactattccacacgtttgcattaatttatgagcctttgtctggttttaatgtatttaataatacatttatacactctttgttttaaaaataatgatatgttttgacaatgcactttttcaggaaaatctgaggtgtaacaaaaagtgataatggtaagatagttcccattttgagtattaaaaaatgagtgcatcaggtaggattgggtttggctgcgtgtatcagaaatccagaaatagaagtgtgttaagtaagagagatttgttgccttgccacatgagtgagctccagctggaagcagtacattgccggtagagcagggccatggtggtcaaggacccaggaaccttccatctttctgtgcaactttcggtcttcgatgtaacatcattgtctaaaatggctgctggacctccagcctctttccaggtgtcaggaaggactccagcagagtgaaagggtttgtccaatttaagaagcgccctttacacagctttcctccaaatcccactggatatttctgcttactttcccttgcagtggattatgtcaaaatagtctaattccttcttttataacaattggagttgaaagctttgtttcaatctctagtgacaatactttagattctgattcccattctctgagggcatacatccgtgttactaggttgttactaaatatgcatgaatcttaactcaagttttttaaaattccagtttggaacccttggagaaatcaatacatctgttcgtattttgcccaatagtctctatgagtgctttatctaaaaatcataaattcagatacatttttaatatcatgagactaaagaaaatatttcccgttgtcaacagatatcaagtttcagttataaaaaatgagtaggttctggatatctgttgcacaacagtgtgcctgtagttaacaataccgtattgtatacttaaacatttgttaagagagtagatcttatgttgtcttcttattataataaaataaaataaggtcgggcgcggtggctcacgcctgtaatcccaggactttgggagtctgaggcgggtggatcatttgaggccaggagttcgagaccaacctggccaacatggtgaaaccccgtctctactaaaaatacaaaaaattagtcgggcatggtggtgcgcacctgtaatcccagctactagggaggctgaggcaggacaaccacttgaaccagggaggcggcagttgcagtgagccgagattgcaccactgcactccagcctgagtgacagagtgagaccctgtctcaaaaaaataaataaaacaaaataaaataaaatttccgtttgtatactgtctttaagacccaaatcaattctctctgactctagtgggcactgatatgttctactgaagtccccatcaccaggtagcacacccatcccctagctgctgggagtgcttgttgcccacagctgcttccttctccagagacttgttcttaccctgaagaaagccaggagcctgaaaggccatatgtgccccacctcaggtcagtttgcaaccaacgactgaaagtacaagagtccaacccatttgccacaaggtgagatcagctctgggatgcaatttgccctccagagctccctgtgggatcatgtggaaattggtctctaggtgagatcgcattcttgttttgttttccccaagccctaaactgtccccttcacacagtttctcttttgagcactttctctttttattttattttttgagacacagttttgctcttgtagcccaggccgcagtgcaatggcatgatctcggctcactgcaacctccgcctgctggattcaagcaattgtcctgcctcagcctcccgagtagctgggattacaagtggagcgccaccatgaccggctaatttttgtatttttagtagagatggggtttcaccatgttggcaaggctggtcttgaactcctgacgtcaaatgatccacccgccttggcttcccaaagtgctgggattacaggcgtgagccactgcgcctggcctattctaattttcatcccttcactcacaaatgctatgttccatcaacagcttgagtgtgcacatgagcgcacacacacacacacacacacacacttctgtgcttgctttttcgtggctgcaaacctgctctcttgtgaatccctgaatccacgtatgaagccgaagcttttatttcattttattttttagttgacaatataattatacgtatacctggttttttttttttttacattaactcttctccttatttcagctgagtttctatttatgcacaatatttattgttccgactcaggggaagtttcaagacacaaaccttttgacagcctaaattagttcaggtctaattcagaaacagaagtttccagattagaaaacctgaagctaaagaagtgcttgaagaggaacagggattcatgcaaaactagactaggtaacagagttactcatacacaagaatcttggcaagggttgaagtgggcatgtggaaggggctggcttgaaaatcaggagggtcagagaaagagctgttattgttaccctttgttcctcctcagatgtctatgcgaaaggctctctgagatgagagcacgatatagctcatgccggttcagccacttaatcttttttgatttgactgcacccaggtttctttaaatctgagctttagtttccttaactgtaaaataatggaaaaattcctggcccctcctcacctggttgctatgaagattaaatgagataatatatggaaaagtcttagcatataataaggtctggaacatgatatacatttaataaaataatacattttacttattattatcttatacctttcatatgaatgttaactgcaaaacagcatagccggtatttgctccttcacaatagaaggtaatatgcttccctgttttactaatcagaaaactggcctcgaagaggttaaattcctttcttagaactattaagaggctaagccacacttcaaactcaggtgtgtctgactctgtagtcaatgttcttttcacttcatggtgcttttttcctgtaaagtgagtataatatttcctaaatcataataaagctttgtgcattggatgacataaatataaagggcatagtgtataattggtactcaataaattattccttttcctccttccctaggcaagaactaattttctttctttgtttagcccctgtattaccagccaagtgccttgggcataatatacgtaaataggcctagtatgttgaattttaggcagccatcttgatttttgtaacaaatctagttctctttaaactattgcttagctcttccaacaataacaggccttgtagttatcccacatggggtgatttcaaagccacagagggaagattgttcttaagttactcctgcatgcagtgtcaagctctcacaactttcacaagaagttaaaaactacaattttatgtcagtctctcctccagtaatcagatagcttctttgattgttctgataacccaagagggaatccttctgatacagaaggtggctatatctcatatattttgcaactcctcccaaaacatagatcgatcatctcaaagaactacatgggaaacttgatagccttttggaggctgagaaagaaagctaagccaaccttgaaggaagtcaacaaattgtcaatggcattttgaaaaactgcattgcaatagacatctacactcatacgttatttagctcccttagggatatgattactcttggggtccacaagattcgatgcatgatcatttgagaatatttgtggctactattattttttaaacagatcaacaggcatgacagaatttcatgcatgaatttcatgataaggcattctcaattttatgttttcacttaagtgattatctctaatgttcatctatttccttcttatttcaatcctaccctagtttcaacccatccttttttatttttttcttgtttgaagtttaccctaatttcatgactgagcttctctaaattccttaattaagtcctccttgtccatcccagtacaaggtgtaatcactttcccctatatctggattgttcatctggttgttatgtattgcattaagttaatatatgcaaatataagccttgtaaatacagagaccaatgcagtccaattttgggtagatgccacattcaaaacaacaataacaaaaattaattaagtagtcacacacttaaataactcaaaagtgttaaaacagatatgaagaaatccacagcaacatttattataaaattactctttctcttccttggttttgcggcttctcgagttcataggagactttcagtttccagtgacctggaaactcaccattcctcatcaccatcctttactgtagtaacttccttttacctgaccaccctgcatagtcacagaagatgcactcctgacaagtgatcctcaaaacaggtagtaatctctttgagaagtgtgaaatgtcttttgttctccttgtcgttcccatgattgtcagctgtgaggacccttgtcattctaccctcaatcccaattctgcagggtctggggattctggggattcttttttttttttttttttttgtagttaccaatcttatatagatacaataatttttatgtgtattgatgtttattgacaaccagattttaaggtccttagaaattggagttaattattatttatcatccaagctcctttccctctgccctcttattttccaacacagtgtcttgaattttatcactttatcgtttagttattaagggtgatttggtgaaatgtagaacagactatatgaattacctcagcttatggtattatatgacataataacagaaacataaatagactatcataaatcttaactttttctttattctttgtaatattttattagtcttatccatcttgcttggattgccaagttcttctgagaattccagtaataatgttatcattctatcgagcttattattcccaactgatcttctattaagccagtatgaattagctactgtttatgagattagattatgcactttaatctctagaagaagcaaaagtaatgaatacactgaatctgccactgagaagacactttaaactgaaatgtttcattatttttctaattcctctctcttttgaatctgagtatgtttttggggtacgatacagtgtaaaggtttttgtacatcaagtcatagacttggaaataaaacacaaacaactacccttttgatgaaaatacataaacatcatagccatttagccaacttttaaatttaaaacaataaattcatgattttagttggagggtaaacatgcatctttttaaaaatcaaatgtaaacacagaatctatactcatgatgtacacacatggacataaaatattgcatatattttgggagattcaaagaccactggactccaagttaaggatatttttctctaaataaacttagtgattgaattatagaaaaccacaaactaagttattgactgaagtataggaaaagtatagtgtattaaaataaagttttggactaattaacatgattttactaatagtgacaagaggatttaccaagttctgattttttctaatgtaaaaaaaatttgttaagtaagatctttcaattagtaatttctgaaaccccctctaagtaaattaaatttttatatccttgaagaaggatgttgatcagtctcaccttatggcaagtatctcaatatatgtgatctgtcacctagtcttttctctattttattatttctgtgtttgttgagaaaaaaattatttgtatacaagtgcatgtactatttaatgtcatgtaattaaatccctttgatagaaacagttaatgttagactaataatgtttttagctactggtgaaatacttcctcctaatgcgttaaatgcaggataagatcttacttgatactaccacgggagtgtaatctctcccaatagtgtttgtttcatcgaagttggctcatttaggtagtttgagtggccagagttgtataagtatgtttggcagtggtggatggggaatggacagcaccaaaccattctttctctctgtttcgatttttctcctttgtctattgctagttgcttattcctgagatatccttcacctctctcaagaggcttggtcacttaacttcattccaactctacacctccattggtggaaatggaaagatggatgaaattttagcccctgtttatggccagcatccgactagtccttctttcaaaaatgagtaaataaaaacttattatggtatctttgaaaagttgcctgtctatgctctaggctttaactcaataaattattttaatggaaactgtgaattcaaaggaaataaaagtatggcggggaattatgcagaaaatactgtaatatatgttgataaaattttcccaagttaccacacctccagtacctagaacatagccagccatataatagacactcaataaaggtttgttgaatacatttgtttaatattcctttttactcttttcctcccctcttctttcccatgcatttctagttactcacatttataataatatattcagtacattttttgtttgcgtcaagatgcatcatgagggaatcacctgaaatttcaagtcaggatgacctggttagaacatcagttccaaaactgaatatttagagatccttttcctatctataaaattggatcacaaaatatctctcaaagggtacaaagcacagcaccaaccatatattaataataaggcactgttacataaatgtcagttcattttctcatcaccttcttaaccattttgctctctcttctgtttcaagacagtaaaatccaaatctctgtcagtaaaagtatatctgaccactctaatttaataaaatgcagcaataaattgcatgactcatttctcaattattttgcatgacttactaaaagtataagacagggtacctgagggatctgtgagggaaaggaagcaaaaatcatatacatagaagtggttggtttcaagtgattaagaataacctacgagtaggtgaaaaaaagaatcaggacaatacaatagactgcaaccaaaggtggaaaaaactgtaaaagaaatagctttagaggtctcaaatctgctttcagaatgctaggatctagttttcgtaaattagagttctcagtaaatgtaggacaagtcccagctgtactactgtagcattaacattaaaactaagccatatcttgaatctccttttctcttaaacccccagaggtttcaaaccagagaggtggtcaaaatagattcccctactacttcccctttctcaataagaagctctcatctgttgaatttccattttgaggcatttagacagctgagagagagagagagagtttaaaggagtgttcaatccatctggtctgttttttccccaaattgcggaagttatcatttcagtaacattatatgttgttaagcttatacaataagatctgattttaaaacttaccacataaccacagcaacaaatattgtgttatattgtcagaaggattgacacatagatcaattgaacagaataaagagtctagaaacatacccacacaaatatgcccaacatatttttgacaaagtttcaaaataaattcagtggaggaagagtagtgttttcaacaaatggtgctggatcaatgggacatccacggacaaacaaaatgtacatagacctagacctcatacctactacagaaattcacagattagagtgagattatttttctctttcttacagaaatcacatccatattgtctacttctgtgaagttcagtatggtagccacttgccatctatggccattggaatgtagctagcatgaattgagaggtactataaatgtaaaatacacactggactttgaagacttagtgtaaaaataatatgaaagatctcaataataattttatatgcgttgcatcttgaaatgatagtatttgggatctgtttggttaagtaaaatacagtatggatgttagttttacccatttctcattatttgtaatgtgggtatcagacaaattaaaattacctatgtggcttggatcatagttctattgctcatagctagcataatctataatttccagtttcagtttctttatatctgaatgagaaataaaagatatttgtgaagcaatctgcacatagaactaaagatttttattatttttaataaaattttacatttgtctgtccaagcatttgaatcattttgcaaccatatttattgattatttctacaacattcagtttagattttgcataaataaaaacttttgtaagtgtatgacttaataaatattaagcaggatctagtctagttacttgggaacggcaaagccctcgtcttcatggagcttacatttttcagttgataatctttatgtaactctagaaataattataactggcttaactaagttagcttttgggtacatactcaacttgtgagagcggaacctcatgggtctaccaatgagttgagtattacctaaaagtatccatcttgccctgggcattagccaatgtacttttcagaggaaatgcagggtgtttgttaatctggcaaattacctgagtaggcattggttacatggaagtctattcagagattttcctctgtactacgttgtattgactgattgcttttctgactttctccctagattctgaattcatcaagagttctaggaggggggctagcgattaaaaaaaaggacacattaggtacaatataccctactcaggtgacaggtgcactaaaatctcagaattcaccactatagaactcatttgtgtaacaaaaaaccacttccacccctaaagctattaaaattaaaaaggaaatacaaataaaaataattttaaaagtttttgctgcgtgttagcacctatgtcagtaattggtaaataataagtgtaaataaaccaactgatggatgaaatattttgagagaacattaattcaaaatttaaaccagtcaatgtcacattcaagccagattgcccaacctagtatatcatgaccattgacttcaatctttaatatggattgtctaagtcattggctggaagggagcatctgtctttgttttgtcctttgaagcaaacacttgaaatcagtttagactctcatctagacatttttgttgtttagaaatatatttaatggaatctttaggctagattcagaagagaagtaagctgtcattacccaaggattgttaaccttatcaataaattcgtagccctagggcataaagatcatttgtattgtttcagaggccttcgtgtctagtaaattttctagctattgatttttgcaaatgtacaaaattaacaattgtgagagagcttttaacaagcttgatttcagttgaaataatatgaacagtaattgttttttttctgttcattgggtaataaaagcatgtatgtaattgggaggccccaatactgttgaaggtaaatctgatgagaaacaaatattcaaagactttgtgcatgcaagagaatcaatagaggcaaaaaaaaaaacctatcttctagagagttgacaggaatctatcttatttggaaattcaaaaggtattcatgcatttctgtgttctgtgccagttacattatttatataataaatgcttttccatattgctttttatttgaaattctcaatcctataactaattattttacttagggaatataactgtatcctttacgccttctctttgattttgtcaccatgatcatcaaaagtttctccccatcaataatccaggtagactcccagccacactcaaggcatcatcaatgatctcagagtactacattggattaattactaatttttcctcattgacttctgttttccacaattcaatatttttctaattttcatttatctgcttgcttcttcctaaagaaggctcatgtaagtttgtatatgtgacaccaatatctctttaatatgtttaatttccttgacgtttctaaatagggttaatttaaatttaccttaagacccaaattatctgaatgcaagtttccaaaaaaaaaagctatatatcaggaattttctaggattcaatttcaaaaacaactttcagagtatggctaataattcaaaggtcaacaaaacacctgagcccactacaatcccagtaccatacaggtcaaaatcaagatttggcaggattgtaggatcccaacgttctttctgatgttaaaaaatatatagtaaataaagttattttttgttcaacagtattttggaagtagtaattgccacattgtatatatgtttgccattagccataaacgtgattttaccaatttattttcactacattgtgcagaattccggaaacttagataaaatattttaacacctaaatatatacacacacaaacacacacacacatgcacacacgctactcttccatgcccccaatctttctctttatctcagagttcaagtgtagccatgatttgacattacaaaatagaaagagtactgttggtttacctgtcaaattacttttatcaagccattaatggtgcttactgtgtgccagacattttttctaagcactttataaatattaactcatttaatctttataaagcctttaaatgatatatgataatattctctctttacacaaaaggaatttaagacactgaatggttaatgagcatgctgaaggccacaccattcataagtggtaaatgggaagtgactctgggccattttgttcccaagtccaagcttttaaatattttcctctgctcttactagacatgatattgctgagaaaagttttggtcccctgtgcttgaatataagtataataattaagtcatcttcttttccatgctcaaattttactctcaaaatcatttttctgtgccacacacattttaacagtttttcattatatacttgttcttctgagtagaaattgactctaaaatacagacaaaaagaaattatatttaagataaagtaaaaaaaaattctgggtgaaggatacattagaatatgtgattcaatttttacaactttcatataagtctaatttctttcaaattataaagttaaaaatctttcaaataattactagtcgaattgaagaatatgaattgaagcagtaccatttagtgcataaattcaaggacacaattttcaagttatattttctatgaacagtcctccctgaagttgtgcaaggagaaagacctaaatcgaagttagtttacctacattaaaatgcataaaataataatagaaaaataaactgaagcaaggacaataatatggattactctccagctttcataactgtgtttttaaatgttcttcagcagaaattattcaagcgttgtttcctactacagaaagaattctcaggacttctcagaaatacgtcagtttttaataataccaatacctgataggagagcagggacaatttcagtgtcattcatagatgttgtcccagaaccaagacagcatctgctccatagtaggtacttaatttgtggaatggataagcaaatcagtgatacatatcgatggtgctttttctactttaaaccacttttaaatgtgttaatatcccattaatagccttctagatttatttgagtagaaattaattcttttatttgatagactagtaaaaggcagcctagacagtttaaattgctcattcaggttcactcaatgaatacacactgaggaaaaaaaatatatatatatatatgtatgtatgtatattcagaaataaagcccagccatgactttttgttcaaggttctttgtactatattccattctttgaactgaaaagaggagaaattatagaagaagcaatgttttaaaaaatagacataaatgcataaatcaggtaacacacttttttggatacataccccacaatacctgaaaaagtagtaagcaaagtcactgatatttaatagaggaatgatctgaaaactttacaaatcaaaataactttgcgctttcaatttttagaaattaagtatttctccttactgaattcatccgtatgtagaaaattatgctgtattatttcaccataagttttaatttaggagtatgggttattatttggaaagggaaatgtttctcaaatttacttccatgttttaaagaataatcctgttaatctctttctcacatcttctcatatatcttatttcacttttaatttcctgtaagcttatcattcctgttaaattactccttgccttttctcagcgatgattgataatgatattgttgagctgtgtctctttctaacacctagactactattcaaactatatcaatcactccattatatttttaaaacctagaatatactactgagatctctcttgacctggtattcctgtatcctgccatctccgatttcccacactgagcacctttccttccttcagcatcctttccaatcagttcagaaagctgcccttaatctgctattctgttgccaaaacaacatcattaatcactttcagttaccttctttgcttcctatacatcaaaacttgagcgcttcctttaccctcagttactgctccactagagctttcttgttttaacgccccatcttcttgtcctgtgtgttttggttttcttcctcttcttacttgatgcccttgttttctttttgtgctattattaccttcattttattttctgtgcatgagcattgcaaattacaaaatcatctctttccccctttgtttactacttatttggttccggtacttcttttattctgtttgtataaatatgtactgaaagcaactgcggaaaaaacacctagatgaattgtgatcctatgtcgtcccttagctgagaaacatttcattcctgagctgtattatttgtcttttctctgaatacatttttttttcatactggctattctcctgtatattctaaacacacctttgtgtaatttaggtgaaattgttggaattataaattgtttagttagtagttgtgaatcatgcttactacagacatgtattatcaaaaatttcacaagaaggatagcgtgatactcaggcactccccacatttcctcaagccaccaaagagttttttgatggatgttcttgtttattggatgctctaaaactagacagacagtaaagattatcttttcctgctgctgaagtttaagtcatttttcccctaacttttattcacacttccaattatgaacttctaacacataaagaaaattgagatttttgtcatgcaatgctgaaacccaaactgacatgtaggaggaaggagcagcagttctgtgggtttgtcaggatgctaaggacatgttgtttttcaaattcgttattagagtcagtgagtttattaggctgaggtagaaaactgtatgctattagtcaaatttaaactaaattcctaaactcaagtcccttatagctcaaaatctgtagattcaagtaaacacttctagaaatgtcctaatatcacattgaaggagatgttcaatatgattttaatttagctgtctaagtctgtatgcaaaaaaaaaaaaaaagaaagaaagtaagtaaagcaaagcaaataataacctcaagtgccaactctaattaattggtagtatcttcttgaactaaaatgtggagaagtcccatctggcctctgtaggagagtgcaatgatctattagccatgctaatagatcagcccaggagaaggaagagaacaggattgttgattgcctgtggaccctgttgtgctagaacatttttcgtatgaaagtctgcatttcaggtgtggtaaattgtttatcagaccacttattttctgatgtgttctactttatttctgatacttgattaaaggtatgctgtgaaagtagtgtagtaataatgactcctaaaatgagtttatgcctctgaaatatagacacacgattcttcttcaataactctgcttatctgcttttagaaagtaagcccggaagtttacggactattgcaatattagattttaccatgtgtgtttattattgataatctaaaggtgaatttattaagctctacattggctaaggagccaaggctaaggattacaattaaacagctcaattatatttagcaagcaaataaaaccttaaattataaagcttccaatgatagcttaaagctcagaaatggccagttttttaaactaagcaataaatatatttttaaaatatttatttctagtgttacacagatgaatttggcacaagcttttcacttccttttgtgaaaaacttgttttgtgcatattccgtccactattttgtgtgtaatactctgtcatatcaaattcgattaattaaacaacctttatgggcatgaaccagccttggtctataacaatttgcaacttcaaagagacaaagtgattttcaaattactgcctaaaaatctatttaatatatataaataagcagaaaaaatatctatagtctttactggagaaccatgcagtagggtggggggagcatatggattttattttggcaagtgaagaaaaaagttattaagacatacaatacaataaaaaagaattcacaacatttagcaacagattggctgtgggtagcagaggctcatgaggagtcgacaacaactttctaagatattggcttagaaaacatgagtgggttgacttacatgttgttttctggagttgagaatgtttttactttgaagaacttttaacctcctctacaagactttttagctacgaggtccccttatcactatgagtaagagaggaatgcaattctgagcagatttctcctaaaactttatatagatagatagatagatagatagatagatagatagatagagatagatatagatatatatagatatagatatatacacatatacatatatatatatatatatatatacacacatatatatttttgagatggagtctcactctgttgcccaggctggagtgccgtggcacgatcttggctcactgcaacctccgcctcctgggttctagcgattctcctgcttcagcctcccaggtacctgggactacagtcgtgtgccaccatgcctggctaattttgtatttttagtagtgaaggagtttcaccatgttggccaggctggtctcgaactcctgatctcgggtgatccacctgcctcggcctcgcaaagtgctgggattacagacttgagccatcgtgcccggcctgtatttttaaaagttgtctttactgaagaggtctgttctaaacacgtattctgtgaggatttgattccatcattttcacacctgttactggcctgacatatcacaatgttttatgagaaaatagaaatgttatgaattcatttttaaattgtatatattgtacaaatttgtattaagcgaagccatggcaggatagcagtctattatttgccttctgtgcactgcagagttccagcagaggtggactttcctccagtttattagagaattttaaaatgtcaaacttcagtcaatagtttatgctgtttctagacctaatataacaaataataacctaatattgcaggtcattttcagaagcagtaaaatgctattatcctactaaaaatttttggagcacaatcacatgatatgaatttcttacacaagcatataagcaataaaaattttacagaatcttaagtgaggaaaaatttgaaaatgctaaaaaaaaaaacagcataaaaacagagatcagaaagtggctttgataattcaacatagaacagcctttagcttttgggctatggctctcaaaatatccaaaaccagttatttttggtgtgtgcgtgtgttttctgattctatttgctcccactcttccaacagcagtcccctgactcttccaatccctcagactcaaaatctttgagtcagtttcaagtattcgtccctttttgtcaattcccattaaatctgcttttgacacatctattcacttttatctttttctaagtgctatcatcctagtgtagggcttcatctccattttcttactaattattttttcaactttcaaagaatcctagaagtgtacacttattaaaatgcatttcatgctttggccctactttaaagcctatactgcattgatttgaatatacacttcggcagtcaacgtccctaaccatctgatcataagctaattattaaattggtatttgatattttaatggcacttgaaaatttcaaagtttccacagttattttattggattttctacaaaaccatctgtgccaggtagtttttattacctatctcttatccaagaggaatataagattctttgaaatttgacaacttacagactacaaatctagcaggtgttagctgtggaacttgaactcatatcctcagattctaaaacagtgtcttagtcacactacccccagtggcttccctctctatccaactctcactgtccagatcatgttccataaccagagttacagaacaattataattaccttccccatccaaaggcttactgtgccacagctcatttctagctgaaattatttcattttgagagatgaacttggacaattaattttggaaatatgaatgcaaaataacttagtaatttaacaacttcagattagtgtagggatagtttcaggagtaaattaaatgttgttgactaaggaagagaaagagaaataatgtgataaaaattattgaaaaggggtatacggtaagccttgtgagataaattctctctactcttgggcttattcgtggtagacatagagctcagaataggttttgtgagatgggaaggaggaattgtatgagctgttattgagagattaaaggttattctgggaagaatacatgtttcagaaacagcaaaaggtgggctcgattcctggttgtcactcattagtcacgtaaatttggttgtgttgtttaacctttctcaacctcagatttatcaataataaaatgggaataacaatatcaccctttctggttcctaaaatactgaacataatatatataaagagttttgtaagaaataggcactcatacataaaaaatggttttattctctaccagcatttgaccttgggcacattatttaacctctctgttcctcaatctacctcttctgtaaacatggggaaaataacagcacctacaccttgttggactgttgatgattcaaagagcagccgccatttgtgatacccttagaacagtgctcaataaatgatataaatgatgtgactaattgataaagacaaaagtcttgtgtttcccttagaaagatgatctaactatactgagactcaatttcctcatctgtaggattgggacagtaatttttcctttaatgttttgctttagtatttaatgagatacgtgacgtatttcatatgcaacaaaatgctattacaatgcaaagagttctggaatatcgaatatgttacaaaatttggggagaaattattagagtaatagagaatttttaacacctaggttggacatttaattcattgatagagttctaatttaaataagattaaaggtttaaaaatccttagttttgtctttaaattttgttatactatcttaaagtttgctaaaaaattgctgtgtctataagtttactagatcatcaccggcaggcaagaccaagattatcatctggatgagttctgtttgttagagatagtaaacacgtgatatctactcaacaccctttgagagaaactcacatttcctcttgataaatgaggtcagatattggtatcatatttaatgtcttcttcaaaagatcgcaatctaagatcactgaaggactttagaatccttgctggcttttgaataatagatttctaaacttaactttgccctgccaaatttatgtatttgttttaatggaatgtatttaagggttccatgtaccattgtgctatttttgcatgcccaggcatgctcggctgagaaggcaggtgaggactgaaatccagccctttgtaaaggcatccaagacacactcatgggattgtgtctgccctgaggaagtagagccttccttcacataaaggcagtgtccctgactaggctgtggccctggtagctgagtccaccctagaggacactttgcctctatttttcctaaacgcgttgctgatatccctcgacttacagtggggttatgttccaataaacccaccataatttgaaaatattataagtggaaaatgcatttaatatacctaatctaccaaacatcatagcttagactagcctaccttaatcatgctcagaacactgagattagcctatatttgggcaaaattatctaactcaaattctattttataataaagtgttgagtatcttttattcagtactgtacttaaagtgaaaaccagaatggttgtatggatacttgaagtgtggtttctactgaatgtgcactatttcataccattgcaaagtcaaaaaattgtaagtggaaccattgtaaatcggggattgtcattatatactttagaggtaggcctgaatgtgatatagataaaaaattgattgtatttttaaattgtatttaaaaattgaggtatgcaattcctcaaggatctagaaccagaaataccatttgacccagcaatcccattactgggtgtatactcaaaggattataaatcattctactataaagacacatgtacacgtatgtttattgcagcactattcccaagagcaaagacttagaaccaacccaaatgcccatcagtgatagactggataaagaaaatgtggcacatatacaccatggaatactacacagacattaaaaaagatgtgttcgtgtcctttgcaggaaaatggatgaagctggaaaccatcattctcatcagactaacacaggaacaggaaaacaaacaccgcatgttctcactcataagtgggagttgaacaatgagaacacatggacacagggaggagaacatcacacactggggcctgttggtgggtgaggggctatgggagggatagcattaggagaaatacctaatgtagatgatgagttgatgggtgcagcaagccaccatggcatgtgtatacctatgtaacaaacctgcatgttctgcacatgtatcccagaatttaaagtataataaaaaaaaaattgaggtctgcaacaggcaaagccactaaagaaactcagatatttttcattgtaatgttgaaaaagttatgaaatttcactaagcccgtgtctatgaagtgggaaaataacagtgatatgaatattatatgagaacatatttgtaaaatatttgttgtatgatagatacctagttttgaatgttagctatcatttttggctcttataataggttattggaaggtaggtgtgactcctatcttttaagcatgcagaatactgaagtgataaatttcatcattaattttcagacctttgacacttacttcggtgtttaaaaatattgatgtatgcagacagtttatctcctaaatatgagggaatgttatcatgatcactcaaaggatataccataactcatctgacatttaaaatgtcagtttgattgataaatgagagtcctgggtagatgaatgtgatttaaatggggtttggtttgcatacagaccaaataaataatgattcagttctgaagactggctagactagggctagggcaattaattggggtgctgggacatgatatctgagcaacagatgctaggttatgctgctttggtcaccaacaggcctgctccataacaggcaataggtacatagacctgacatttaagagcagttaatgtaggcctcaagaccttgaatggtaattaactaacatgaagaaatggaacagagtgtcaggattatctattatggcacaatttcctattctgagcatgcccagtggtgggtcagaggggaggtcaaggaacagatgggatcaggaagtaaagagagctctttccagctaggacaggcctgaggggaccgaatagacaatgcaaggcagagaatgagtcacaaggaacaaagaacctggcgaaaaccagagccacactaggtttctgatgaagctggccaccatgggcttctctcatttaagacactctctcaatccctcacgttcttcaggttggcatatgactgaacttaaaggctggagagctgcagcctacatgaggctagcaaataattaatgcattacagagcacttaaaatatgatacagaaatatacaattctgcatgtaaatccaagtattatgaaggaccaacacagaaatatataggcaataatattatgtgaggccataagataatgactttttattataataattatgcctgatctaaatgagctatgtttgatttctgtgtactttcatagctttatagccaagcatgacttctctgcccagaaaatcctgcctgatttactctttagcttctctctaatttactttctttttttgagatggagtttcactcttgtctcccaggctggagtgcaatggtgcgatctcagctcactgcaacctccacctcctgggtttaagcgattctcccgcctcagcctccagggtagctgggattacaggagtgtgccaccatgcctggctaatttttgtatttttagtagagatggggttttgccatgttaccctggctgtggtctccaaccctgacctcaggtgatccacccacctcagcctcccaaagtgctgggattacaggcgtgagccaccgctcctggccctactttacttttaccagctagggactgtttctcattcaatacatatatttgtttgtctgctaagttggatgtagtagttgagtagtggagttgaaaactgagagattgacagcagtcagttcattgaggattgtgttatcacgtgcactgggttagatagtgcaccctcaaaattcatgtcttttctggaacttcaaaaatgtggtttttgtttgcaaatggggtctttgcagatgtaattagttaagatgatgtcatattggagtggggtgggcctttaatctaacatggctgatgtccttataagaagaagagaagaaatacagagaagacacacagggagaatcccatatgacagaggctatcccgagtgacgtgtctataagccaaagaatggcaaggattgctggcaataccagaagctaagaaagaggcacggaacagactctctcctagagtattcagtgagagcatggccctgctaatactttgattttgaacttctagccaccagaactgggagacaatatgtttctcctaaaaaacaaacaaacaactacaaaccctacccagtttgtagtactttttaacagcagccgcaggaaactaatacatcatggaaatgaatttaaacatcttattatctataaagaatgtgaactgtcaaagcttactgttccattggacatcagtttcgtgtatcttttatcgtataatgcatgactagagtaataatttcaaaggacattaaaaaatacagacattttcttgaaggtacccaaacgtttgaattgtgggtcaggccaatatcagcaagggcatttgatagagtttctcacaataaccttctgtgcatgtaaataactgtatcttctcaatagatttgttattgtatatttggtcttgtagacttacccgaggaagtcagataatagcgtatttcgatatactgtgagaaaaataggtacacactaaataggagtatgaaaatacacaaagaattacccatcagcaagagcacattatatttgtttttcttgaaacacccattctttcctccttctactttgttttatttttaatctggctctcttgcttatcttcaaagttttatctcccccaataaatcttcctgccatggtgaaggttaaatgtaactcttccatcatccacgctagcacataccatatgcatagaagttataaagtccttgaagacagagactctattttacacatctttgaattcaaagccctaaaatatttgagccctgaagaagttgttaggacattttagccaccagtgcatactctagtagtgacggtagtgatgtaagtacattcctcagcttttctgaacattagtgaagaattccttttaataaagagcaagattttccattgatactcagatggacaagttttggagtattctcagagatgaaaaaggattatttttcatttgatgtacatgtattctgtgattttgtgaacacaatggatgcttgctcttttcattattattgttattcctttgggtaaggcctttatgttgtcaaaaacttctatttaaaaaaagtgaaaataataaaacattcagccatttgcagtcaattattcttgccactggttagtatatttatttaccagggttcttaattaatgttactgagaggctcaaagatctgaaaaacagcattggttccaagtggctgcatttctttcttattcatttatttattttttagaaatgaggtcttgctctgtcacttgggctgaagcgtggtggcgcgatctgctcactgaagcctcaaactcctgggctaaagtgatcctcctgtttcagcccatgcctggttaatttttttttttttctttgtagagatggcatctccctgtgttgcccaggctggtctcaaactctgggcctcaagtgatcttcccaccttggccttccaaaatgctaggagtacagatacgagccaccatgcccggctagctggctgcatttctttaaggcccagagcctcctgtggtagcatctggatttgaaatgctggctgggtgcagtggttcaaacctgcaatcccagcactttgggaggccaaagcaggtggatcacctgaggtcaggggttcaagaccagcctggccaacatggtgaaaccccatctctattaaaaatacaaaaattagctgggtgtggtggcgggcacctgtagttccagctactcaggaggccaaggcaggagaatcgcttgaatctgggaggcggaggttgcagtgagctgagattgagccactgcactccagcctgggtgacagagcaagactctgtctaaaaaaaaaaaaaaagagaaaggctcataaacattgtctatgtctaagctgcaacaatgattgatattgtgaagattattaatagtgtgggtcaactgaaggggaaggaaaacaccaaaggagaatttttccctcccaaatcataaaggcattcatttttcagagaagaagagaggaatattactttcattaaaagaataggaaaattaaaattgttgttattagccacaaatcagggtagagctgtgtgaatccatggggagaatgtaagattataagcagaaatcaaggttagttttgtcttgtacttctggaataagaaagatgatatgtaatcagaccatgtctctgataattttgttaaattagatgaagaaaatcacatggataagaaaatgtaattaaatcactaaaaataagaatgtcattgttttcactttcttttgctaagtaggaggtgaggaaaataaccttttactctgtacatgagtaattccaatatcctcttagaaatgacaattggattgtaaaatgggcttgcctttgaccatattctgaaaggataatataatgagttggcaaaagaccccatgaatagagtttatgtagaaagcaacaaaaaaacacaaatataaagaaatgcctacaaccaaaggtcagtataattgatagcaagatttcaaggggaaaaattagggtcagggaagatataaaatttctgtctccttgttttggtgatttttaatctagaaataaaacaggaatagtgaaatattccatagtatatctaaatatccatctttgtggcagggagctagaaagattcaggattattatttataaaccaatttagactaaattcaaagactgaggagatacacctaatttagaagaaacaggagctctgagacctgactttgcatattactactaatttttttcttagtgctcgttttgctgcccaggctggagtgcaatggtgcagtctctgctcactgcaacttccgcctcctgggctcaagcaattctcctgcctcagcctcctaagtagctgggattacaggcgcccaccaccacgcctggctaatttttgtatttttagtagagacagggtttcactgtgttgatcaggctggtctccatctcctgacctcaaatgatctgcctgcctcggcctcccaaagtgctgggattacaggcatgagccaccgtgcctggccagggcctttttaagtattattttttcttctaaagttactgatgctcaaatgaaacctaattttgaaaaatagaatgtttgaaagaaatagattgaatgaaaataacacagctgatatttttagcaagattcttggatatagctttagaaataaactagccagaaggagcagtatggcaagattaccttttctttatatcaattagacatattgtatcgtatgacttatttagtactgaagatgtctgtgcctttctgcagttgtttttcatctattaaaagagaaagatactatctatgctatcttttcaagatccctgtggatttgaattttcaagtgtatagataaaccttgattgatgaaaaattgatggacaaaattaattttataacaaaggtaaagaagtgagtattgccttcataatgtgccccacagcttttaacagaatttctttaaacaatatttaatgtatttttaaacaattatatatttcaatattaaatcttaagtatgtttcaggaatatcttctttaagataattgatatatcccagttttcatacgttttaaattttttacgtctacagtattatattttcttttgaaaaattgcgtaacattaaggtagtaaataaaaacaaaaatagtttaatgtctcttgtgggaaatacagttttgttttgttttgtttgtttgtttgttttgagaccgagtttcactcttgttgcccaggctggagtgcaatggcacgatctcggctctccgcaacctccacctcctgggttcaagtgattctcctgcctcagcctcccaagtagctgggattataggcaatgcactaccatgcccggctaactttgtatttttaatagaaacggggtttctccatgttggtcaggctggtcttaaactcccaaccttaggtgatccgcctgcctcggcctcccaaagttctgggattacaggcgtgagccaacgccccctgcctagttgtttttgaccacatattttttctctgaaatataaatgatttgtagcccaaaagtttaagtctgaatcaattgtctgtagtaaatgctgcaccatctacatttgttaatgagaacaatacagaactaacttgaaaactgctcaaattttcccttgcataatgctcagtttttaaaatgtattgccttctgtcttctcaatgggattgctgctttttaaattttcattaattcctaaaccatattccattgtattttttttgtacatttgctttaagtgactgtctattggaggaaaagaaagtgtaggttttctggtgaattataatagcaatatgattcctggaatgaagcagcttttctcgtttggaatgaccataaaatggcaatacacttaacagtaatacccttgtctgtgttacagcaatgggtcttaatggttttccatacgtgaacttagccgcttgcctacagagaattactaagtaactagtatattccacatgtaaaaatctccagagggcttccacacactttaatacacgctgatatacaatataaatgcaacgtatcctgaagaaaaaaaaaaatcacaaactccgtgtgtggctctcaacaagctactattttctcattagaaaaataggaaagctggccaggtacagtggctcacacttgtaatcccagcattttgggaggccaaggcaggcagattacctcaggtgaagggttcaagaccagcctggccaacaaggtgaaaccccttctctactaaaaatacaaaaaaaaattagccagtcttggtggtgggtccctgtaatcccagctacctgggaggctgaggcaggagaatcacttgaacctgggaggcagaggttgcagtgagccaagattgggccactgcactccatcctgggcgacagagggagactctatctaataataataataataataataataatagtaaagctaataactatacaatatcttacctaaatgtttaagaacacctactaataatacttaaaaataccaaaatataaaaacaaaacatacaaatgtaaagaacatacagtcagtagtacagcaaatctatttgattacttttttcaaaattctattttaatttttttgctaattttaaagcactgttattaaaagaaaatattttcaattggttttattctcattgtatcttctagaaatactagttcattttaggaaaataaaaatagtgagagaaaacttttagctctgaatatggaccatgtcccatgcctgccactttgttctagtttttgttatttaattatcacacactataaaggagttcttaccaattcttttttttcttcagaaataattgattcttcagttttttaaactgctttattgaggtatgattggcatatacaccaattctcttttataggcaatgaaattggagatcagaaaaaattgagtaacttacctaagactacaagtaagtggcagagctagaatttgaccccagacaggcttcacatacaagttcacagggccatcagctgcctgaaggcagagaccatgatttgtatccatagtatttatgtatctctcatatctaaataaaatctagtcactattcagatttaattgatattttcaattacctttgtatttttaaaagaagacacattatagaaatttgatactaaatgtaagtattcagttctttagttaaattgaagaaaagcagaaataatattctgtattaatacattagtgaaaagtcagcagctaaaatgtaagagatgtttggtgacacaagtaaaaatggattgtatactttttgccttatactacctgactctggcatttagatataacttgttccagagacctgtcataacttatatgtttcagacaagaaaagctttgggttacctgaaatagtgtagttaaaaatcaaacgctgtactcatctagagggactttgtttatccattcaaaaatacatgaacagggctttatcttggcctatttgaactccatgccagagggcagcataacatagcaaagcatgctgacctctccttatcactgcccttgttgaaaaccttgagttcttcttaatagtctggtatatagttttaaaatgttgatattttgttcacagctatatgtgatctcctaaacctttgcttcaaaatagtctatttctctgttgtggtttgcttcagggtaaaagccctctgatttcccacaatcaggacagtaatttggtaggttaataagttatgttgtgtgttagtgaaatataagtgctaaggaaaataaaagtagtagggcaagggaaatcaggaatactagggcctggaaaagagcatgaaataatgtgttatgatgagttgcactgagcaggttaaatcagaacgagacaagaagccaactagatagagaagattgttccaggttaagggaatgagtggaaaaaaggctctcaggtgagagtgtgttcaaggaatagcaattaagactgtgactactggccaggcgcagtggctcccacctgtaatcccagcatttttgggaggccgaggcgggcggatcacttgaggtcaggagttcgagaccaacctggccagtatggcgaaaccccaactctactaaacatacaaagattagccgggcgtggtggtgcacatctgtaatcccagctactcaggaggctgaggcaggagaatcccttgaaactgaaggcagaggttgcagtgagccgagatcacgccactgcactccagcctgggcaacagagtgagactccctctcaaaaaaaaaaaaaaaaaaaagactgacttttataaggaagaaagtagtaagagatcataaaatcaagaggatttggtggtacagattagagacttgtacgttttcgtttctgtgcagtagagaaagaacacagagacatttgcaaaacaatttaagaggggattccttcaatacttttctaatatccctctcccaaaggcctgtttattcttcagctaatttttactgataatttgtattttttagaaagaacgcatctctttattttatagtcatgtatcatcaaattatgtagtatataattatattagatcattacatgagcaggaatgggaacaatcacagttgattcttgctatgttccggttatctattgctgagtaacaatttattataaaacttaatagcttaaaacaccagtcactttttatagctcatgattttgtgggtcataaatttgagcgtgggtcaactgggtgattttccactctatgtggtatcaacttgatccctaaatgatactcagctggcagatgagctggtcagcagaatccaagacagctgtactcatatgtatgttgctttggtggagacgacagggagacttgggtcaactagatctattgactctagtacctacatgtggcctcttcagcatggtagacccaggattgttgaacttatcacatgggagctcagggttctagagtgaatgatacaaaagacggaaaatataagtttctggtatcttcaggcctaaccctggaaactagaacagcagctctttcactgcaggggtccccaacccctgggccacacaccggtacccatctgtggcctgtgaggaacccagctgcacagcaggaggcgagcggtgagccagtgaagcttcatctgtatttacagccacttcccattgctggcattactgcctgaaccctgcctcctgtcagatcagcaatggctttagagtctcaggagcacaaccctattgtgaactgcacatgtgagagatctaggtcgcatactctttatgaggagtatcaggcaatctagtgactgatgatgtgtcactgtctcccgtcatgcccagatgggaccgtctagttgcaggaaagaaagctcagggctcccactgattctatgatatggtgagttacataattattttattatataatacaatgtaataataataatagaaataaagtgcatgataaatgaaatagtctccaattatcttaacactatccctcacctcccccccactaaccccagtctgtgggaaaattgtcatccatcaaaccccagtctctggtgccaaaaaggctggggaccactattctactgcattctattagagcagccacagaacccacccaaattcaagggaggaaacaaagactttacctccccagtgaagaaatgtcaaaaaaattcgcagctatctttaatccgccaaagcatacgatttatctctcatagagagatttctagttaaggtttttcagcaggtcatcttgatccatagtaaatctaacaaagggaatggagagctttggttaatctaatgattcagttaaatggagatccattaaaatagattctactataattccattcattatttttcacattttttctaattttttattattcatagtgtttttgtccaatgacctttaaaatcatgaacatttaatatataggaatggcatccatctgaatatggcataattataaatgaatttactttaatatctagaaaacattcttgttcgttctctaacttttagataaaagccatcccttcttttatttaatttaactctactttaaggctttaaaaacctgactgatagggaaaaagtccaaaactgggacgctcgtgtagactatttactgcaataaatcattgtgaaaaatatgggcagtcaagtgctggatattctatttctgtttgaaccctaagaaatatcaaccgtcttctcactggcttttagcacatctgctccatttaaaactatggcagggaggtgtgtaagattgaattgattgtctcttggagtttactgtgcttctttcgaaactttgtttttcagtaaaggcaattgcttcttgagcagtactggttattccacacccactaattatcatgcagccatttagagttgaaatggtaatcaaaccaatgaaagcccaagattagcagcgttccttcttcatttctggtagagagattcatctgaatatctataaaggattttgtggtgcattctctggcagatgcagtaaaacaagtgcaacatgaactttaaaatacagctttgagttttaggttgaattttaagttgaacatatttcaaattttgcaatttaattataggagttaaatgatcttaaaggatcattctaggtctgaatagaattttaagagctagattttattaaagaaaagatatattttaagtgataaaatttatatattttgcccttcagaaattactggttgatgtttctattaaaattattaagatctaaatatacaatgatactcgagaccaattctcatttaaggaatggcatactgtatgacaggatgtgaggtgttaagagataattacatgcctagaaggtgtagtgaatcatatgaccaaaagccaagaacatccagagaccaaaattcacagtcatttcaaatatcattactccctggtgtgtgttattctacttagaaaattgcatgtttgttgtttgtaaatttagagacaaaaaatgcttaaattaattttttcatcatttctaaaaatttgctttaatatttactagcccagtaaaatgtattcaaatcataattataaatatcagggctattgagcaggggaatgtgtcaactgccattccggaccttcttctggaactaattttgattgccagcagaataaaatgcatgcaatgaatacaatgaatgtaatgctaaatcaaataatcaagtgtttatgtttatgtattttgatccccctatacatttaaaataactctgttttattagaagttctgtatttgagataaaatgcacctccctctcatttttcctggtttgtatgtgagaccacagtatttcacagtagatatccagggaaataacagacaaaagaaaggagagcaggaagaatattttaagatttattggccagcggcggtggttcacgcctgtaatcccagcactttgggaggctgaggcgggtggatcacaaggtcaggatgtcgagaccatcctggctgacacggtgaaaccccgtctctactaaaaaataaaaaaattagccaggtgtagtagcacacacctgtagtcccagctactcgggaggctgaggcaggagaatcgcttgaacctgggaggcggaggttgcagtgagcagagattgagccactgcactgcagcctgggtgacagagcaagactcgtctcaaaaagaaaaaaaaaagatttattaatttgtcttcaacaaaatactaactctgcagtgccctcaccttgattccttacttattgaggactaagcctatttttgtggattgaaatgatgttaattatctgcatccaaatacccctcataggggcgactgtgagcacgtccctctactagtaacacaatactcaggtgagagctggcaaacacaggaagactgaaaagcccgacttggaatcctgacttctacattttttaactgtgtagttctgggagtttcttaaactcgtgtgcctcagtttttccatttgcatctgtagaaagattgtaatagaaactaccttctctgttataatgattatatgagctaaagcatgaagaaatataaagcagctaaccctgagttagctctcaagaagtattttattattaacttgttaataccttcaacttataaaaatttaaaaattatgaaattttttaaattatgagatttacataaagttttcagaatagtctaatcaatacagacagaaagtagattagtagggcctggggacgtggagaaaggagagtgattcctaatgagtatggggtttcttttttgggctgacgaaaatgttttatattagaaagtggtaacagttggccaggcgcagtggctcacacctgtaatcccagcactttgggaggccaaggcaggtggatcacgaggttaggagatcaagaccatcctggccaatatggtgaaatcccgtctctactgaaaatatatatttaaaaaaaatgagctgggtgtggtagtgcgcacctgtagtcctagctgctcgggagactgaggcaggagaattgcttgaacccaggaggtggaggttgcagtgagccaagatcgcgccgctgcactccagcctggcgacagagcgagactctgtctcaaaaaaataaataaataaaggaaaaaagaaagtggtgacagttgcataactatgtgaatatactatatatcactgaattgtgcactttaaaagagtgaattttgtggtgtgtgagttatagctcaataaaatgattttaaaaaataaaatgagaaggatgagagaccggtatatttcagaatagtgcacttaaaaaatttgtttacagaacactaattgttcagcatactttctactggacattactgtatatatatatatatttagtattatataaatacattatatgataaccatatctgataaatattatcttactttatagatgatgaaactcagatcttcaatgatggaagtgacttatctattgttgagttgtaattggatcttatatatatttccctgctcccacagagcctacatttctgaaaaagaaattatgtctcttgtgataaataaacaagaaacatatcagataaaagtgttgcattgagaacaaactgagttgagatagtgagtgattgggtagttattccagcttcagtagtaaagagaatctttgctgaagaggcatgtcagctgagatatgactgtctagaggaaccagtcatgtaaaaactgaggaagaaccttccagaaggaaagaatagccagtgctaagacactgaatttcttatattttgtgtttagaaatgctagggttatagttagcaagatagcctggaaggagccttcccatgttttctcatatatgaaataactaacatggaggattattgtgaagttacaaaaatacatgaataacacctagtatagtatctcactcgtggttggtatataaaaaatattgctgttctattaattcctcaatatatagctattctatacaggtcttatgcaaaaaagaaccttagtgaacgtatttcaacttggtaagagttagttacacatgggctgacacaatcataagcatggaaaatagacaatagattgaaagcattaacaatggtagttggaacttcagaaaaacccactctttcttaatctatgatgaaggaaatggtgggttttccagtggtattgaaataaaaggaaactttttagatggtggagtaaggtatgcaaaggtagcgagcgtgtgcatctatggctggagagaaatccaaagacaagatagaatcacccttttgctctctgtgaaaactctgattttcctttcatggactaaggtctacactctccaatcatcttagttgcatacactattaattcatcaatcaagctacgtcatcctttgtgatatgttttgtttttctttcttctttttaattattgtgggtacgtaagagttgtacatatttatgaaatacatgtgatattttgatacaggcatacaatctgtaataatcaaatcaggataattggaatattcattacctcaaacatttatcatttatttgtgttgggaacattccaagtctactcctccagttaatttgaaataaacaattaattattgttaactataatcaccctattgtggtacagaacactagattttattcctactagctaactgtatttttatactcattaaacaagcccctcttcatcaccccctccccactacccttcccagcctctggtaacaatcattccactttctacctccatgagatcaattttttagctcccacatacgcgtgagaacatgcaatatttgtctttctaggttgtgttttgattagacaacctcttatttctaaaatttgcttaaattatttgagtacttgatccttcacattactgccaataaagcaaaccacagttgaaacttgatttttttctaatattttgaatgtatgctgtgtgcaaaggtaacaaagaggaatccatttaacagaaaacagattgctaatatcttcatcatttactttagattccagtctttggatatcagatttttctctggtcttcatatttatttgttttggcatcagattgcattttcttgcttggtttaaaaaaaactgtatttttttccctgtattatcggtgttgatttcctctgttcttattcttcaaattatgcagagaaatgtgtacaaagttaggaggagttaacgctatataaaataaactatctattaatatcattcggttaattttcaaagaggctgtaaatagatcatggatataggcaaataccagatgccacataaaaggaaaacctcaaagacattttttcttttattaaaaccatcaacagtaagaactgtgacagtaggttttgggtttttttattgccaaggttattatcagccctctaccctaaataagggaataaaatgatttctagtttttggacactgtgttatattattctgtaactacaggaacataatataatgctacagtcaaaagaataagcttagaaatcatctaagtttaaatttgtcactcattttctagaaggatgaccttatactatctatttaacctttctaagactcaattgccttataaataaaatgattataataaagacttcataagttgccatgagaaaagtattaagcacagtttctgagataaccaatattgataataatataataatcatcacaaaacattacctttctccttgtaaaaattataacgttaatggttttaaaaatgtaattctagtaccaaagtgaagtttgtattatgttctagttaatatatataaaaatttaaagaaaaactaaaatacatatagctgtgaaaatactcactaaaccaacatagaaaagcatttgttttgctctgtaaatctaaccttgatgattatgataataaaaataatcactgttaggttattttacttgtgattaacttctatttatgtaccctccctctattgatgtttaacaatagttcatagctatgactatttcatttcatatggctgttcctaaaatcatactgaacatctgactccatattcttaagacaacttgggacctctatctcttccctgcaacaatatttgtgagttgacaaacataaaagcctatgctttagcacgcacaagagatgtggaaaggtaccatttaaattagtaccataaattttcctttttatgtttcctaacctcatatttattgaaatgcattaaattaactcagacatctaaggatataacatttaatttacaataatctttatggttacttaattccattaaccttatctttgaaaggcgtcaaattaagaaatacagagcctgtcactttcatttattcgggggaggctgtgaactattcagatgatgtatctttgattgagggaaggaggtgcccaagaattagtcaattacgcaattaaaaaccccaaacctttcctttggtatgtttcacacaaaatctccattgctgtgctagattacactggatgatgaatcactacttgaatcacttcagttttgattattcaaagtaaaaattgaatggttggcattttcaccaatttaaaagcctcgccgggcacagcggctcacgcctgtaatcccagtactttgggaggccaaggcgggtggatcacctgaggtcaggagttccagaccagcctgatcaacatggtgaaaccctttctctactaaaaacgcaaaattagccgagcatggtggcacatgcctgtaatcccagctacttgggaggctgagacaggagaactgcttgaagctgggaggcggaggttgcagtgagcggagattgtgccattgcactccagcctgggcaacaagagtgaaactccatctcaaaaaataaaataaaataaaagccttaactttcattttctcaccagattttagcttgacaaaagctatctttaagggttgcttaggcatttcagtttgaaatgtttatgttcttgctataaaatgtgtggacatgtgtgtccaaatatatacacacaagaaattttaggtactgtcatagtgttgggatcattaagaattgtgttttcatggcgagtaaattaatttcctctgctgtgagtcactttttggtagtgtatgcatggtttaaatgaaactcactgaactgtttttgtggattcactgcttggttgttttactaccctagagagcaattaggtgtatgtggagtgtgttgaacctataaaattttacttgtgtgatgactgcaaagaaaatgaaagtagtgtcatgcaatccatgaaaactctgctgagtttctagctagtctcttaataaagtttacacaattcaaactctccaatcatactgaatatcactgaggctcttaagacttgtgaaaatcagatattttaaatttttaaattgtcatattatgtcgccaatttccatttctactctatatttatagtacttttttgcattttgagtgcacaagtcaacccgtttggccatacatagcaagacatgtattggtgagagcagcaaaaaatatgtaactgctcgtttacaacttttgaccagtagcgaggtcacactgagagtaccgctcaggagaattgagtcaagttttaggctactaaaatttgctgagctctgtgacctagggacatattcctgactccagcaggcctttgaagaaatcacgctggcaacctcacaatagatgaacaagaaaatggatgaacacaaccatattataagaagcagttatcagacgcatgggttctggagccaggctgtttgctgagttcgaatctcagtgctgctatttaatgactgtgaccttaggcaagttgcttaactctgcctctcttaattttggaaattaggaaaagaactacttacattttaggtttgttggaaagatttatatcacttaaaatgtatacagcatgtaacaattattgaattatacttaacaattattatctaggggaaaatatactgatgattttgtatattgtatatatatacacacacgtatatatcagtaactttaaatggggaagtcactaaaaaaatcataacttggtgtaaatatacttaatctgtatgccacggctagttttttgtttgtttatttttgccaagtttctttaatttctgttggccttttggggtcaccccattagcatctgcaggatagcttacttatacaggggaaagtgtctgttaccagtacagtacagtggtggtataaggaaaatctattaaatgaagtcctgggtgtttatccctataattgcataaatgtatgtttctcaggagtagtgttgtgtaagtaaatggataaaagtcatagagtgctaaagctaaatggaaacaaagttatttagtccaattcccatattttatagatgagaaaactgagaatcagaaaatggagggatttgttcaaggtcatagtagttattgtctgagatgaggaaaatatccaaatgtctgcttaaatactgagatatgcttaagttagcgttgaaaatattccatttaaaatagcaatattttcttcctcctgaacatctttgtactatttagaaaaacctagaaagcatgctggaaaactatccctttttcccttgtcaacctccaattaacacaaaagcccaaactgtacactgtcccttataaaaacaacctaaaattttgagaataacattcataatcttaaaagaaaattacctacttactacatatgctggcaatgtacttgctgggcaatcccacttgaaattcatagaaattaaacagcatttcagaacatcattccaacacctaattaatgacagggagtgactgctgactaaagaatgtgtccatgatactttcaatttatagcaaaaactcttaactattgatagcagaaatgtgatatataaggatcttgttctgtcctttcaaaagtcaaacagaaccactgtcccttaaagctgatcggcaaaggaagaagctgggagtccaaaggatttatttatacaaaatatgtatttccctaatgttcactttccaactttgattagacattttttttttttttttttttttttttttagcgatggggctgtattagtcaattctcacactgccataaagaaatacgcaagatgaggtaatttttaaagaaaagagtaattggctcaaagttccataggctgtacaggaagcataatgctggcatcttctcggcttctgggaaagcctcaggaagctcaaaatcatggtggaaatgaagggggagcaagcatgtcatgtggccagggcaggaacatgagagagagagtgggaggtgtcaaacacttttaagcaaccgtatctcatgagaatacactcaccatctgaagacagcaccaatgggatgatgataaaccactcgtgagaaatccacccgcatgctccgatcacctcccaccaggccccaccttcaacactgggaataacttaaccgggcgtgatggcaggtgcctgtaatctcagctacttgggagacagacgttgcagtgagctgagatcgttccactgcactccagcctgggtgacaagagtgaaattccgtctcaaaaacaaacaaacaaacattggggattacatttcaatatgagattatggcagggacaaatattcaaactatatcaggggtctcgctctgtctcccaggcttcagtggcaccatcgtaactcactgcagcctggaactcctgtattccggcgatcctcccacctcagcttccccagtagctaggactacagttgcgccaccacatctggctcatttttgtagaaatggggtctccttatgttgcctgctttggtctcaaactcctggccttaagtgatccgcccatctcggcctctcggagtgctgggattacagacgtgagtcactttgccctcccggactggttttatgtgtgaaggaggctgctgctgatttcatgagtaagctggagaaacacattaaggaatgatactgtccccttagttgtcaaccttcaaaataggaaacaaataatagcaaagaggtaaacgtggcagaaagcaggggtgagaaagggaacaatcagatatgcgaaacatcaaagaacaagaaatagcaacaaacccacgccagaagccagcaagaaaaggagaactgttataagtaccagtaaaaatgctgaagaatggcaataaaaaggagaaaaaagtactcacaagggaggccttgaaatgacaataatctattccaggatgaaaagaaaaggaaacactactccaaggcaaaaagaaaataaaaagtaaggaaaatcaagatagatgaatatcttcaaaaaatcagcacaatggagatagagtgtttagggaataagaaaaaaaataaaagtagacagatacagaaagaagtagcaaatgcaaggagcaatatccctattattaatgctggcaaattgtacttatatctctttccagctatatagcatgttcctgggaaatagcctaaagcactgagaattagggataggagaatgctgttactgtgagaatacgaattaagtaatgccagagaaaggctttgctgccaatataatagctgagtgatcaggccacgtcatttctgtctgatgtttcttcctgtcgaataggtaatagtattatttctctaactcaagggacattaaaaaaatattcagttaatgtatatataaatggagacaatatagacagatgtttaagaatattttggttaaaaggacagactcaaagccaaactttctgggttggaaatccaactctttcattttctctcagtactgtactgtaggactctctttttatacactttttttgtactgtcttttttatacactgactctcttttttccttagtttcttcatctgaaaaatagagttaataatagcacctacctcataggattgctgagatgagaaaattaacaaataaaaatcacttagaccagtacctatcacatagcaaggaaaatctcaactatattcattgtggtgatgttttgttaataaacttttaatatgaatgtaacatatcacattcattaatatataggaattatatttacttacattgataaaagtcctatctgacatcatcttctgttccttcattatttttcccttcttcctcactttttcagttctgtctctcttggttcattccaaaaaagggtcatttcttttttgcctcaactgcagaatgcatattatttatcaagcaattattgagcacttaccatatacaggcactgttagaaagacatctaaggcacaattttttagtgtgctgaaatagttattcattcagcaaaagaaggagctcataaaaataaaaaagaaatgctatgggtaaatataagaacatggtgatttcacttggtcctcttggatgtaaaaggaagctttaccaaaaatgttaaaataataattgatggttgcagtgctgctgaattacatcaaactttctattgtctcacatttcactttctaatttgtccgttcctagtgaaactagaagctgaaaccacatttttactcatttctcccgttatcctccccccaccactataaaaagagaacatttatgcttaagtgcttctgatgatgtgttctcagtatctcattctgttagactaatagtcctcatgccaagttaaagtggttggaaatcctagcacaccttgcctaagtgtgttttatttatcttgctacaccccgttttattgtaatagtcttgggagagccccgaaagatggcattgacctatttctataaactttaagggagcaggggacgatctccctccataacaaattccaataaatgatgaggttaaaaattatagaaaggatatttctagagaggtatttttatgtgataaattttaatatatatgtatatagtttttaaacttgaatatataaaatatatactaaacttgtatatttatatatgtattaaacttgtaccacttaaaaattcttctgtagaaatatcttttctataatttttaacctcatcatatataatgatggtaattcttcgtacttcttactcctaattgtcttagttcaattgggctgctataataaaaatatcatagactgtgtaatttataaacaacgaagatttattgctgcagaactgtttctgcagcccaggaaatccaagatcaaaatgttggcagatttggtgtctggtgagggttctgtctgcttcacagatggtgccttcttcctttaccctcacatactggaagggcaaacaagttcccttggcctcttttataagggcactaatcccattcatgagggctccgcttatatgacctaatcaccttcttaaaaccctacctcttaatactgtggcattggggattatgtttctacatatgaattttggagggacacaaatattcaacccatagcactaatgaaatacagcatttttagagagcaatgtctactattttacaggcagcttgctactcgtgatgacaatacttcttcgatctagtatcccagcattgttccattaacaatgtatgcatcttaccaatgtaatgttcagtaaatattttgcatattttaagaggaatctgttgtggttttttttttttttttttttttttttttgagacggggtctcactctgccacccaggctgaagtgcattggcttaatcacagctcactgcagccttgccctcccagaccacaggtgcgtgccaccacgcctggctgatttaaaaaagaaattatttgtagagacaaggtctcactacgttgctcaggctggtcttgaacttctgggctcaaccacccctctggccttggccttccaaagtgctgggattacaggcatgagccaccaaacccagcctgattttttataatacaaaataatatacactcactgccaaaagtagaatacagaaaaacacaataaaggtaatagttgcctataattttgctattcaggaataaccagtgttacctgtttggcacagacattcctattgagaactatataatgatagctaatatttactagcacttggtacatacccatgtttcaattaccttatatgttaaatattatccatttatgcctgaaaataattttataatataagtactgttattagaccattttaaaaatgtgaaaattggtgcaataacaagatgcattaacttgttcagggtcacaatgccattataaaatggagccggaattctaaaccaggcattcaggctccagagcctaggtttttaaccactaagaataatacattttagtattttagcatacacatagttttggaagctgcttaattcacttaatatatcatatggttttccaacgtagttaaatattccataagaatgtgatttttttatgtctgcatataaatatattaataggatgtaccagaattgttttcatttctatttcatgaatatttagtttgcttctaatttttcacaatagaaatgatctagcatattttataaaatttttgagcagatgtacaagtatttagagactagtatttgtttaaataacacgtgttggacgttagtggggtatatatcaatgtgaaacatgaagtagatgtttgctttgtggtaactatgttccaggaacagtgctaggaagcactagggactggaaagctgtaaaaaagccagtctttctgttcttaaatatcttataatctaatggagagagaaacctgtagaatagtgcgtttcagtagaagcaagcttagtgtactgagaaatgaaaggcagatgatgaagtttggacaatggatggaaactatcttatcaagagttggggttataagaatgacagtaggtgatatgaagaaactagtgttttaagaagatatatgtggcagcattatagacatatggggatttagaacaggattatacctactgaactggacttattttatttctagaaattttgtgataataaataccatacattatatgttgttctcatataggagacgtaatatatgggtatgccattaatcaaaggctgattttaagtggaagaattcgttctgttggtttacagtcccagttataaattaatgggcttaccacgtagttgttcccagatcttggaagtattgaagttttttaaaaattaattaatttatttttaactgacaaataatagttgtacatatttaccgagtacaacgtgatgtttttgatctatgtgtatgttgtagaaagagtcagtcgagctgactaacatatctatcacctcaccaacttatcattttttgtagcgagaacattaaaaaatctattcttttagcaattttgaaacctataatacattatttttaactgtggtcactgtgaggtgttgaatgttttaggaaattctcagataatctcagggccaagtgttaagcagatcattctctgagactggatcttctgcagtatgtctgcgaacttttttatttcactctaagcctttgttgttgccttcaggggttactgactcacgtttaactcaaggctgactgagttagatatataccgcctatagttgatgggttttgttgccagaaatattcttttgcttatcagtggggaaggtttttgcttctactgctggatttaaaggtgtccctcaagattccattactcagttcattgagaaaagcttaaagctaacggaggggagttctgagctctgtttgatgaaggaggctgggtaaaataatagctcccaagttggctcaagttcttccagatgttcatgtttatgtaaaacttaacacttagagatattccatgttgtaagatgtctgtgcaaaagttccttatatcaaattctaaaatgatttttggtcatcaggtgcaaaaattaacactaatcatctaaaataaccaaccagatagattttcattctgtttgacttttgaaagcaaatacccctatgatattgagtgagtgttttattgtttgattttccttcaaacttgctgtaaccctatgggaaagatatgcaatcaaaataaaagaacagtatccaaaaataaatgggtcatgaagaattgtgcttaaaatcgttaagtaaacagacacacaccacagtgatgagattgtagaaactggaaaaaatgctgccagctgaagagctgcaaagagtttggcttttcatgaacttagttactgaaatgaaagttcctccctaggagagaagccaaaatcatagcacggtttgaataaaagtacacctttccaaagttactgcagaacaattatggccgggatcctttactcttattgagaaagctcggtaacctcttattttaaattgacttccattgagcaataatgcctccctgcttgcactgtaaggtactttattgggtaatgtgtttacaagctggtctcatttttctttttgtaataggagatgggtagcttactgctatttggaggtgactccaggaaacatgattttcaagatggtcattttaaaaaattgtgattattgggaataataactctagagacaagatttaatggacttacttccaatttattcagtatgtcaccaggttattgcagttctagttttaaatctgtacattcgaagtctacgttgttccctgatgtactgtatatttaggtttgtactactacatataggtgctaggtttagctccaactctcagcaggagcctaacctctcagaacaattattgtagccagatctttggtggccctactacttgctttttttttaaccactactatttctttaaaatcaaagatatggcaaacatattactaaaaggaagaaaacccatcttcaacaacattatggtgtttttcacttcaaaggcttattttgtatgcatcatttgatttaatttcctccaaagccttgggaaatgtgagtgattatcatcttattattgttgttgataaatagtagctactatttatttagcactaactctgtatctggaactgtggtaaacaccttgtagtggaaactaacaatagcctcaggaggctggaattgatattatccccattttacagacaacgaaatgtgatataaataacataacgtgccaagattatgcagctagtacataggagaactggaattcaagccctagttaaattgctttgacttcggagcctgagtgttgattgtctatggcatgttgccaagctattttatagctggaaagcctggtgatgctaaaagtttaaataccttgccctaggtcataaaattagttcccaatgccttccaactgaaatcccaaacattttttattacactttgttgtccgcaggactgctacccgcttatatggtactctttgaaaattaaacaaagaggcatcctccccacttcccaaatccacagaatagccaattttgaaagaaagcacgcttttttttcagtatgactctgctttattggaggatcacagggatggctggggggaatgtgggtatgatactcaagcacctttgtgcaaggtgcaatgcccagagccataaggagtggccccagttgtgctcatttaaaggaatagttggacaattctagataatattaagggagatatccaaaagagtttcctataagtatgtgctcttaagagctgtaaggaagtaaaattttgaccccattagttacatttctaacatgatctaacatcttcccttcactgccaacgaaaatgtttaagaagatataatctgacagcagttatgctaaaactcccctgaagccaaaatgtgtcacttctcaaaatgaccctcatcttcacaagcccttgaagaggagttgaggattatttatgaactaggttttaacctaaggtgatacattgtgctgcagttgttactgagcttagggatcattttgtctattcatttcaggttaccattaggttctttttcaaaatcaattccttttaattatacagctaccctgggcatatattaaatgtcttacaacattgatacgctttcccctgaagtactgacaaagtaatagatttaatgcgcaaccacaggcataaaaacccacacacagtgtaagcatacaatgagtacactgatactcacaaaagaggtttaaaaaaatgtctgtaactggggatgtggtggtgtgagggccccatgaatttttagcttggaggatatcttatcgtaccgatgaaccctgaggatatgcatgaaaacaagctcctactcacaactttttttgcctgaatggtaagtttgtctgcagggcttggtctgattgatttgaaggagcatggtctagaaagtggttctcaaactgttggataacagaatcacctggggggtctacctaaatgtgcaaaggcctaagtcttatcactgctttaatgaatgtaggtctctgggtttataatgagctcgtcagttgattctgatgagcacctaatttgataacaacatgtcaatgggtacagattctcaaacttggctgttcattagaattgcttgagtctcatttctagagactctgatttcattgatatgaagtgcagtttgggcactgggtttttttcttaaagaagttcttcaggggattctaatatcagcaaagttggagaaccacgggtctaggggcctcgctacccgatgtgttgtccaaagaccaccagcagcagcagcagccgcagcagccccagggaacttattggaaatgcagaatctcaggtcccacctaaaattaccgaatcagaacccgtattttaccaagatacccaggtggtttgtatgcccattaactcttgacacacacttgtttagggagtcaggtagagctggattcttaagcacttccggttagttggatgactgaaaaacctctctgagctccaatctcctcacctgtaaaacgagtttaaggaataacattaccaatattgcaggtttgctgagaagattcttgaatgcaatacctgaaactcagtttaattcctagaacagtgaaaagcctcattaaatatgaagtcccggccaggcgctgtggctcacgcctgtaatcccagcactttgggaggccgaggcaggcggatcacctgaggtcgggagtccgagaccagcctgaccaacatggagaaaccccgtctctactaaaaatacaaaattagctgggcgtggtggcgcatggtagtcccagctgctccggaggctgaggcaggagaatcgcttgaacccgggaggcagaggttgcggtgagccgagatcacgccattgcactccaacctgggcaacaagagcaaaactccgtcatatatatatatatttatatatatatatagtccctactagaagagagtccctgtgaacctttttttacactagtggccccagagctaatgaggccaagccccaccaatgatcgtcgtcacagacattcctgtttttctgatatttataaaggttccttttaggtatgaggtgatttttattcaaaagaacaaatgttcccagatgccaagtgtcttccgctaaaaggataaatgatcagaaagcaatccttagctacagtgtccttgaaggtgcattgtggaatcttgcactgttgtgcaattgtgaacaacttcatcagacagtactgcgtatttgtactgtgttatccttaatttttccctttagatcttaatttgttatttatttcttccctggccaagagctaatttctttacagaaactcatatatagggttccttttttcctcctcaagtcagtaacttctgcaattaactacttttttcttaatttctctaactttggcccaactaaatattttcccatcattcctgttttgccgccctcgagctaggacatggaacttacttgttcggaaaagcttctatctgattgaaagggcatgctaattctttctttatagtgtaattgtttcacatttaagagggaaggagaaacgcctaaagtaataccacagaagaaataccctcaactaatctttctaagcagtacgacaatgagtaatgattacagttaattaagttaggcaacctccatttccattcacttagtagcactgctaattatactcatgctacaaggtttctttagttcttctgtaatttggatgcagtactctttgtagacaagggaatacggtacgattaatgagatttttcccaccaacacctcctgttctctccaaatgaaatttccgcatctgaaaattgagagtagggaacggagaaaaaaaaaatcagtcacattttaacttactgccagcacggtccatgcttataattgccaaatattttatattaaagaaaacaaggtgtgggtttttttttttgtttgaaaccttgtaaaattgtggcttacgtaaaaatgaaataagtatagaacatggctttttaaaaatatcagtggcaatgataatgacactttatattgtatgcttttggtcgcattaaataaacatatgttgagcacatactgtttgccgggcactggatctactaaaaaaaaaaaaaaaaaaaaaaaaaaaaaaagcaaaccttaactgtaactctggatttcttttacatgaacttcaatcattttaacaacttactctaaagaaaaccaagaactgcagctctacttggttatattgttaatgaagtccttggaaaaatttagtttatatgctttgatcagatggggattgacatacttaagagttttatttttaatctgaaaatccacttcaatcttatgctctgggtaaacagtcattacagaagcctgacacaattctgttttttcaagaagcaggattcaaggtttaacttcaaatacaaatttgagtaagttatacggattattccttttaattctttttttaaaacacagggtttatgtggatgaagtttcgttcttaatctccatttgccttaagaattaacttctgcattgtggtttagattgagtttaagattgtttcagattttaaaatgtatttttaaaggtgtgtctggaggaagatatttgtatgtcaagcactgttggttttcataggaagttcaaatgtgttttcagcagcactggacgtttttagagttattttcttctcctagcatcacacaggtgcgcaactttataggtccagtctcttctttttgcttccttctctgcttctttttctttttcactaacaccagtttgcataaatgagtgcactgtcgagttcacgtgaataccagacaaaaatacaggtgtcttcataataatcagctcctctaagtctactttccagtttctgcttcagactcagataaatcctatataaagcagacgacacagttatttctagaggaactgaggttactgattagaagggaacgtaatcaggtagattgagccggtgagggaagaaaccattgctgtgagaggggagtgtttgcaaaatgctgtctgtgaagctgaatctgtgagaacacctcactattcacggcaaccggagtggaagaaacaggtgcaaaaagattgtgtgtttgtctgcttttgtgaggctggtcagagattctgtgcctgctttatctgtgcttggctatgactctacctccaggtttaccataccccatagaatgtgtaagagaaaagtaccaacagggaaatcagcaaaaagctttcctatgaaggtgtgtagccagcctccgcagaatttgaaatgtctgaggtctcatctggtgagtaaaagctgcagataaatgcaacagccattcagaagaatgataaattccacaagcattcagaagcaggcttccctaaaggtgactcttttggtcaatttgcaacccctgggatatatttggatgactcctgttccatatgcctttctataaaagttaaattggggcttttgttgtgaggaagggaagaaaggggtttgacaccaataacctataggataatgcaaatcactgaaataagaaggaacccatattctactttttgggttgtggctttaatgaactttgtcttcaggtatctaaaattatttctagtatgaagaaaagaaaaaaatatccagaccttaatctataaacgataatatttttacctcaaattaaatttctaaggacgtagactacattcataaactcattagaaaactaatgagggatttttatattaacaatagaaaaacctgtgtttcacatatatatatgggcttatttatgcatatatgtacatatgaatatgtgtatgtgtatatatatacatacacatatacactcacatttttaagaagtttttaatcaaagaagacggaaataacaaggatccttgtgaatagtaatttagacatgtttagacaagcacaacttattaggaagcaaactgggacaattgtaaacagtaattccaggctgcctaattatctgaaatatctcagaatgattttagaggttaaacacttattattaaatggtagcttctaaataaagtgaaaaggtgtagtgatttatcaggtttttttttaattatagaatatcctaaaattctaaattagcatatattctgttgccaatatatactgtcagtatatttgaagtatattaatttctaaattatgttacttttattaaaattccaaagagtttctgacttggacaagttttctctatctttaggaagacagctagtttttttttcaggggggtgagctaaaagagttaggataaagtacaccgcattaaattaaaaacgtgtgttgggaataaagacaatccaaagttaaaagtctatttggatctcaaattttcccataacttgatttgtaagaaaagttacccttttgcaagtcttctctctcatttggtctggactaagtggttgtcatttctcacttacagattgctgttttactaatctctttataaatatattttttaattttatatctgtattttattcatcagattgtcctggaagtacagaggccagttgatggtttatgagttcaagctgagccgaatatagctaagccctgtcttgcctgacatttcatcaaaagctgtgttgatttgcaatgtttaccgacctatttattgaaccttcacagcttgaactatgccaccaagctcgctgacattgctgagattatctctaaatgcatgtacaaactaaggaggaaattgaaaaataagttaaaaacaatcatccgtctatttattaaattatgcttatagagtccttgatttatgtatttgtttgattgttctccgcaaagccccatgacctgatttttctttgatcttcccacacactcttggaagacgatagattagaacagtggttctcactcttccttgagtgggcatcagattcacctggagggctggttaaaccacagcttgctggatgccacccccagagtttctgattcagtccttctgaagtggggccccaacctctgcatttttaacagattttttaggagatgctgatgctgctagattactaagaacagaaaatgagtgttctaatacaaagagcagaaaataattgttcttaatctagttacctgtgttctctttatgcgttgtttagtttacactgtacaagaaaataaacacatatcctcacaaaattgaagcatatattctactaaagattaatatattaaaatattgaataaaatattaaatatctatgttaggaaattgtattcctgctgaaactggcagtaaaattacttaaattacttagcagtaaaattactgttgacaaaagtaaacaattggtcattaggtctcaaatacgtaaaacctcaattttttttttttttcttgagacggagtctcgctctgtcacccaggctagagtgcaatggcacgatctcgggtcactgcaacctccacctcccatgttcaagtgattctcctgcctcagcctcccaaaaccctcaatttttaattactcctttgattcttattctctgcgatttctccctatgtaaagttttagtctattatatttttagtaaaatgaaagcatgatccatgagataagcacttgaatctatactatacatcaaagtctccccttttgggccattaaaactaagatgttttccaacttaccttaccaaagccacagtttgaaaactgaaactatgaaaaaactggatattttgcttaattataatgcttcgtaaaaaattagaacgtctttaaaaatgttaacaactaaagtcaaacattcaaaaattataacctttgctataaagttatatgttcattcattgtagtcactttcttttagtaaaatgtaagcttttgatgtattctaatggggcgcaacgtttagattaaatgtttaatatggataattgacttttaatgaaatttaatctagatgttcgtaactgagagttaggggtgaacatgcctttaaggatgtagacatttttattacaattattttctccatgtttttgattaaacatatcaaggaaatatatattattttttatttaacttttctaatgtattaatttttggccagtcctacctatcacatgcttcagcaataatcagagctttgatgacaatgtcacattattttaattcagatgttattccagtttgataagatggagctgatctttagaaaacaagtgtaccatatttctaatctttaaatattatattgaattatttcagcctggctcacttgccagtttttcccttttgttttcatgattaaagcaactgataattattaacatagataagatttatgacattaatttatggttttcttcataaaaataaagccttttttttttttttttttttttttttagatggactttcgctcttgttgcccaggctggagtgcaatggcgagatttaggctcaccgcaacctccgcctcttgggttcaagcaattctcctgcctcagcctcccgagtagctgggattacaggcatgcaccaccacaccaagctaattttgtatttttaggagagacggagtttctccatgttggtcaggctggtctcgaactcctgacctcaggtgagccacctgcctctgcctcccaaagtgctgggattacaggcgtgagccaccgcacccagccaataaatccattcttaacggaattttagagcataaatctgagaaaagaaactaaggctgtacgtactaggtctcctatacaccttgtctttcatcattgaatccttagtagttaatacctgcttggaatgtaatgggaattcaataaattaattaaataaatggatgagtgaatcctacagacaattttgccaaggaagaaaataaagacagggtatttttatttctttcggttttttttttttttttttttttttttttttttttcagacagagtctccctctattcgcccaggctggagtgcagtggcacgatctcggctcactgcaacctccgcccttcaggttcaagtgattctcctgcgtcagcctcccgaatagctgggactacaggcgcctgccaccacgcccagctaatgtttgtatttttagtagagccgaggtttcaccatgttggccaggcttgtttctaactcctgacctcgtgattcgcatgccttggcctcccaaagtgctggggttacaggcgtgagccaccgtgcctggccagggtatttttatttttattttatttttttgagacagcgtctccctctgtcgcccaggctgaagtgcaatggcactatctgggctcactgcaacctccgcctcctgggttcaagcaattcttctgcctcagcctcccaagtaactgggatataagcattcgccactacgcccagctaatttttttgtatttttattagagacagggtttcaccatgttggccaagctggtctctaactcctgtcctcaagtgatccgcccacctcggcctcccaaagtgttgggattataggagtgactcacaacgcccagccttttatttcaatttttactgctgtttgttttcttccaaatgaataataaatatgacattttattctgatagctattagattatgaattgaatgtgagaacaaaaggcattctggttttcgtttgttttaatattggactgaaaaaaaaaaaaaaaaactcatttgaaccgggcgtggtggctcatacctgtaatcccagcaatttgggaggctgaggtgtacagatcacttgaggtcaggagtttgagaccagcctggccaacatggcgaaaccctgtctctcctaaaaatacaaaaattagccaggttgtggtggcaggttcctgaaatcccagctactcgggaggctgaggcaggagaattgcttgaacccgggaggcggaggttgcattgaaccgagatcgcacccctgcactccagcctgggcgacagaggtagattctgtctcaaaaaaaaacaaaagaaagtagaacaaaaactcatttgagactttcaggatacaataatttgtttaccttttcagttttctgattcctcatggtgaaggaatcatatctcttcagtgacacacaaacacacacaggatatatacagttatgtgttaacaccagggatacattctgatcaatccatactaaggtaatttcatcgttgtgtgaatgtcacagagtgtacttacactaacctacgtggtatagcgtagtgcagacctaggttgtatggtatatcctatttctgtttggctacaaacctgtacagcatgtgactgtactgaatactgtaggcaactgtagcacaatggtaaatatttcaatgtctaaaacatatctaaccattagaaggtacagtaaaaatcccgtgttataatcaaatgggaccactgcggtatatgcagtttatcattgactgaaacatccttatgcagttcctatcttttcttttgggccacacttggaattgaaatggaagctggagaaaggaagaacatgaaataaactgatgtttttccagccagtcaaaactcagcctctgtgttttagagaaagcattcggaacacagttgagagagggagagaaagagaagtggaaggtttagagggaggtccccgcttgtttttatctcttcaagcagctctaaatttgtccaaagcagaaaaagttgtacttcgcttcactctatattcaagactcaaaccaagattaaacatgaacctgtgggaaagttctttttaattaaactcatgttatttgaaaatacattatggtaagatatttttttgaaagttaagagtcagattttgtctgcataatgaaaagtgactaaggagtgctgaagttatcactcaattatcaggaaatctagaaaaattactttccaataaaaatgagcatcaatgatttctaccacagccttttggttaaagagtaatgaggagaaattctgccatgtaattaaagataatgaaattatcaatcaaggctaagctgcattaggttctttgactaaaataattttatacaattttaagtataaattaagttaaaatatatacattgagtgtgtgcattaatgtagacagtgccaaatattcaacaaaattatttcaccacctttgatttttgttttttgttttttgtttgtttgtttgtttgtttttgagacggagtctcactctgtcacccaggctggagctcactggtgcaatctcggctccctgcaacctccacctccaggctcaagcaattctcctgcctgagcctcctcagtaactgggattacaggcatgcaccaccgtgcctgactaatttttatatttttaggagagacggggtttcaccctgttggccaggctggtctcgaactcctgacctcaagtgatctgcccatctcggcctcccaaagtgttgagattacaggcatgaaccaccatggccggctgatttaagcacctttggaatcataattattaatcataaatgaaaccaaactaaaaataaagtataccacatgtgagaacattccaatgaataaaatcatttctgtgtgagctagcctgctgttcaaatttgtttatgcttatgcttcagataatgtttacaaaagtactgacagattcctagaagcacaatttctaaacacttaccttggaggtttctagggccctaaaaatatttctagtcatttcaaaaaaccacaaaacaactacaaaaaatgtacttctcccaaaggccatacgtagcacatgcaaaaagagattctgcagagcattttggaacgtaagtagcttttgtggttctgtgtctcaaattagcctgttcttaaaagtctgcaaattaaaaaagaatgataggccaggcgtggtggctcacgcctgtaatcccaacattttgagaggccaaggtgggcggattacttgaggtcaggatgtcgagacctgcctggccaacatggtgaaaccccgtctctaccaaaaatacaaaaaaattaaccagacatggtggcatgcgcctgtagtcccagctactagggaggctgaggcaggagaatcacttgaacctgggaggcggaggtttcggtgagccaagatagtgccactgcactccagcctgagagacagaggaagactccgtctcaataaaaaaaaaaaaaagaatgataaattgagtcaaaattataaaaattcaacagacgctggcacagatttgagatttgaggaaccagtaaaaaacgtagtacatattgataaatggcaatgtggtgtcaagatattaaaattggttttaatcttattaaccaacataaaatatggaaaacttatacatttaagtgggcccagaaaaaagtttgcaaatagcattccaaaaatcgatagaataatgtgaatgctttgttttctaatcttcacataatagggttggactagatgatttataagatccagtatatagcccctaataataacccctttaaaaagtctttttttttttttttttttttttttttgagagagtcatgctctgtcacccaggctggagtgcagtggcacgatctcagctcactgcaacctccgcctccctgtttcaagcgattctcctgcctcagcctcccgagtagctgggattataggcacacgccaccacacctggctaatttttgtatttttagtagagacggggtttcgccacgttggccaggctggtcttgaactcctgacctcaggtgatccgcctgcctcggcctcccaaagtgctgggattacaggcgtgagccactgtgcctggcctaaaaagtgtttcaatagaggagagaaataaacaagatcctgaagggataagaagatgtaaaagttgttgctgatgttctgccgcatatttctttccccacccgagttccatgcagtatcttgctttgctataaacaggagtaagccagaaatatgaggggttgtgttaatgtcaccagaagcgacctttaactacgaggggatggaagtacttgaaaaaagcacgcagccatctcatcttctggtgcataattctgaggcatgttcctcacagcttctcagagattcaccagcaggactgagccccagaataatgtgctcattgacacacctttgattgcctccttacctttcctaatctcactttctctttcctctcacttgtactttttgtaatcaattgccagataaactgtgtacctgcacctcaaatccttgcctcagtgtctgtctggggagaatctaaagtaacacagaaggttagcgagaaattgtttcacatgcttaaacaaaacagggcaaaggcacttaagatgttagagggagggagggtgaggaaactcacacgggatgacttcactctgtttagtacctaaaagtgaacaggaggtggatcgaaaggaaacagttagtgaacctgcaaatcaataggaagggttagaagactggttatgggagatggaccagatagcccagtaagtgaagaaaaggctcatggaacagcagagaaaatggacatatatcatccatatattttgtttccatcctagtctaatttacccttagatactacaataatcccccaactcatctttgccacttgtgcttttgtccttttctactcactccatactctacatggcctaaaggttgagcttttaaaaacataaaccaggttgtgtcaatctctgattaaaattcgttactgctctgatgcgtccaatatctttaccaagaaccacacttcatttttcttccttttcttctgcagtcttgctgcatttcagccatactgacctgctgccatttctcaaatgccagtctctgtactgctattgcctcttcctggaatgctctcctcatccatcctctaactgccttgatcgccactgaatatacactaacatgcatattgtcagtcacgcagtagtagcttaatatgtatttgcggaataaactaatgggaaagagtaacagcatggttcagttgatggtggataatagtgatttactgagtcacaaacaacatcatctgatgccttagcaaagaggagtaggtattggagaaagaagacaatacttacaattctttacttccttgagctcattttatatgtgtgtgtgtgtatatatatatataaaacatatatatgacatatatgacatatttttgacatatgtcatgttatatgcctccttctctattatatatacaatgtgttcaaggaagtaaagatgttcaataaagttcaaggaagtaaagtctaaggtgtctttgtatgtagcactgaagtgatcagtcagagtccaggcttggctggatatcgaacagtggatgtgtgaagtagaagtgagtgatgccaattttaaagataatgagcagtttagtaggcaaggatttagtgtcagatatggaggttgtggttggcagtagtagtagttgtactgggaagctcttccacagtggtgaagaagcatgctgagaaaggccaaaaagtcaaagtagcatcttgctgtggataaggagattggcataaatggagtaaaagttgagggtgaaaagtgatgtgagacaaggacaaatagacaagttggcttggctaatgtaatacccatgatgtaagaaaagctatgctgagatagctaggctaattccaagggacttttgaggggagcatatcaggttatcacatgccaaaaatgtttcatttcagagactttagtcttctcattaattttatcgctaatccattcattttcaaaatgtatttcaggatttcacatcaggtcgactttaaatcttttgttcagatgaacgtttcttttcctaggactgagtaagacagtttgtcctatccagtgcttaagagtaaagcaagcttatgttgccactgcaggcaggattattaaataaccaattactattcagactgtgtcacatccctttaaattactcaagcaagagtcttggccgggcgcggtggctcacgcctgtaatcccagcactttgggaggccgaggcgggcggatcacgaggtcaggagatcgagaccatcctggctaacacggtgaaaccccgtctccactaaaaatacaaaaaattagccgggcgtggtagcgggcgcctgtagtcccagctactcgggaggctgaggcaggagaatggcgtgaacccgggaggcggagcttgcagtgagccgagatcgcgccactgcactccagcctgggcgacagagcgagactccgtctcaaaaaaaaaaaaaaaagagtcttgaacttgttcagcctgaacacatctgatatcctcagccaagtataggatgtaaattagatagcttctggctttactagtgtggaatcaggcatgctttttccccttaggactccatgactaatgacctgaattgtctacatttcaagactagtcagatctctaatggtgaacctatttcattgtttctgcttctgttttgtcccgtagtatatgagacaaaggatatttttatgtgcaaattgcaacaagttgagatactcctttaaaaatggattttctttccatagttgattagcgtatggtaccagatttcctagaaatgtttttatgataaaagtttcaggttctcgatgatgcaaggaaattacagacgttaggtaatgatttgtaatcaggacacatgagaggagttgtaactttactgcttaccctgtggctttgagaatcattaatcctcaatgggcctcagttttcatatctaaaaatactgctttttaggttcagttacttcaagggtcaaatgagataaaatatatgtgttataacaataaaatgtaataataaatatgaggtaccttttcccccagctttattgaggtataattgacaaatggcgattgggtatattcaaggtgtacaatatgatgatttgatacatatacattctgaaatgattatcacaatcaagttaattaatatatccttcacctcacatagttgccattataattttttatgatgagaacacttaagatctctcttagcaaatttcaagtaacaatagagtactattaactatagtcaacatgctgtacattagatccccagagcttactcatcttataactgagagtttctatccttcgaccagcatttccccatttttttccatccccagttactggctaccactgttccactttgctttgatgagcttaacttctttagataaaatgagttactttttgaaaaacaagtttaattggcaaaattgtatatatgtattgtgtacattatgttaaaaaatatatatatatataatgtggcctggtgaaattgagctataatagtagtgtttttaatgactatgtagccgaaagttccaaggctttcagctgattgactatgtaattcttaaatctagtagagtatcttctgatttgagagcagtatgaatcctggcagaaaactatgctggctatacacttttaagggtttgaactgtgttactttatctatatactctgcataaaatattctctctcctatacaggccagctcatttattcttgcttttctagtctgattccccctttctggaatctttttcctccatcgacttttggttctaaagcattcccatcttcaaaaattcaattcaagtcctagttaccacaacactttctctaacggcttgaaacacctcttttttctatgaacttttgttccacatagttatttctacccagttatcgacataattgcttgctaattatttcctgtggattaactttgattccataactttttaacttttttatagatttcctgagagcacgtgctgtgctttatatttctttgtaaatacctcagtagctctgcattttttttctctgtcatccaggatggagtgcagtggtcgatcatggctgactgaacccttgacctcctgagttcaagtgatcctcccacctcagcctcccgagtagctgggactaccagcgctccaccacacccagctaattttcgtactttttgtagagatggggttttgccttatcactcaggctgatctcaaactcccgagctcaggtgacccacctgcctcagcttcccaaagtgctgggattacaggtgtgagccactgtgcccggccagccctgtggttttttgtcgttgttttggtttttttgagactgggtttcactctgtctcgcaggctgcagtgcagtggcaccatctcggctcactgcaacctctgcctcctgggttcaagcgatttttctgcctcagcctcccgaatagcagggattactggtgcacgccaccatgcctggccaatttttgtatttttagtagagatgggtttcaccatgtgggccaggctggtctcgaactgctgacctcaggtgatcctctgtcctcggcctcccaaagtgctgggattacaggcatgagccgccgtgctcacccagctctgcatttttgaatcattgtttataaaacattgagcatcaaataatatgtttttaaatattgtataagtaatactgtgttcatagaaacgttttcttttggccgggcgcagtggctcacgcctgtaatcccagcactttgggaggccggcggatcacgaggtcaggagatcgagaccatcctggctaacacagtgatacaaaccccgtatctactaaaaatacaaaaaattagccgggcgtggttgcgggcgcctgtagtcccagctactcaggaggctgaggcaggagaatggcgtgaacccaggaggcggagcttgcagtgagccgagaccacgccactgagctccagcctgggccacagagcgagactccatctcgaaaaaaaaaaaaagaaatgttgtcttttacaaccatatatttatcatatttatcagtagtttaggcgtggtcttgaaaaggaacctccccctaccataatgcctttcgtttaggagatccccccattacacttgtggcttacattgaaagaaaaaaaaaattatccccttgtctatggtagaaaactgtgtcattcgtggctttgactgcatcacaatccattttagctttttgtcacttaacttgagaagaaatgaaatatatgtggagtgtatatccctgaagaaagtaaaggaccagctgttatcactatagagtttgtattgttgctgaaaataatctggttatgtttgtaaggattaagtagtttattcaacagatgtttggtagtaaacatgaatgagaaaaggcttgttcttatcatattcattatgaatgctgaggttgtgctttactacatgttttcaatgctcatcctaactgaaagtatgaagtggaaggatcaatttctgaatatttaaatgagatgttgattgccttgttataaacattaacaattttcctaagtgtttgctcttgagatagagcatctttaggagaactttatgatttgggctggcagatttagccaaattaacaggaatgtaccttcctaatgtgatcattcatccctaggaacaggaatctgggaacactgaggctatacttctgtatggtgagttatcaaagtgttaaacacaggcactattaatgaagcacagattctactttcagagtaaagctagtgttactatctatgaaaaaatattattatttatgttttcataataataacttctacattatatttattttcaactttttagaataaatctgagctaggaggttcttattttagttgttttccttctatcgtttttcattacgctcttgttgtttgatttggtctcacattttaaaaagcttactgtataagaaagttttatcttcaaaataatgagcactagaggttactataaatggaaatacaaaatgtggatttactaaagtgttttgacttttacctacacatttcttggagtaatttttaagttgaattttaagaattattttgctggccgggcacggtggtggctcacacctgtaatatcagcactttgggagtctgaggcaggcggatcacctgaggtcaggagttcgagaccagcctggccaacatggtgaaaccccgtctctactaaaaatacaaaatttagccaggcgtggtggtgggcatctgtaatctcagctactcgggaggctgagacaggagaatcgcttgaacccgggaggtggaggctgcagtaagccaagaacatgccactgcactccagcctgggcaaaaaagtgagattctgtctcaaaaaaaaaaaaaaataataataatattgccatatattcgaattacacaataataccagattgaggatattagaggaaaacaaatattatattttcaatatttctaaagtattttttgtcttggttatttttatggaattatattacatttatagtataacctaactcttaaccattttgaggggtaagtttaaagattaacttatcactattgacgaattattcatctacccgtggaagtgtctgcagtttatccatttcgaaacatctaatattacatgagaatttacttttctcattagattacataaacatcatgttaaaatgcaatatgtacatgtgacaactgatcttttgggaaaaaaaaagtccatgaatcactcctgtaacatttggaattaaattcattaaccaaaataatatcatgcttcatcttttatattttgcttccttagcatctggttcttagtctgtctaattacattataatggctctgtgttacaacagttgctagaagatttttttgggggggggggcaagaatgatgattttgcctcatattttggaatacctgctttgcaaatgtctttcctatatactagagccagaaggaaacaaatctaatgtttcttattcgtttgaaatttattgggagaccaacttcattcaaagatcaagaactctaaaatttttacatcaaaaactatttttttccccaattactttgttgagtactgcacttccagtcttgagatcgaaagtaatgttgaggccgggcacggtggctcatgcctgtaatcccagcactttgggcggctgaggcgtgcggatcacctgaggtcaggagtttgagaccagcctggccaacatggtgaaaccccgtctctactaaaaatacaaagaaaattagccaggcatggtggcgggcgcctgttattccagctactagggaggctgaggcaggagaatctcttgaacttgggaggcagaggtcgcagtgagccgagattgagccgctgcactccagcctgggcgacaagagcaaaattccatctcaaaaaaaaaaaaaaaagtaatgtttagccttgaaattgctaatacaatggacggtatccagcatatttcttttttgtatgcaattaatatttttactttatttattttatttatttttttgagatggagtctcactgttgcccaaactggagtgcaatggcgcagtcttggctcactgcaacctctgcctcccaggttcaagtgattctcctgtgtcagcctcccaaagtgctgggattacaggcacgagccaccgcgcctggccgatattcttactttaacagttgaataagttaatattttattggagctatgcaattagttaatttcatatagtgaatatattaatatcttatgaggaagagccacaattttagtataataatgtagataattataactcaggaggactatgatcaagatacactgtaaggatccttcaccatattttaccaaaatattattttatagttcaaagggggataggacggtacacttccaattatgctgcaaatttgttattattactgaaaaagtctattttcttcttcaagcaattaactattaatgtctttaatgtcaataaaccgcatagcgttatagactctctttgaatttctctgaattagaaataatttttgaataggaagattaacacagactcattttaattctgtaatggtagaaataattaatctccccttatctgtagggatacgtgttctaagacccctggtggatgcctgaaactgtggataataccaaaccttatgtatatattatgtttcttatatacatacacatataacaaagtttaatatatacattaggaaccataagagattaacaacaataactaatattagaacaattataacaatatactgtgataaaagttatgtgaatgtggtctctatctctcaaaatatcttattgtactgtactcatctatttttggactgcagttgatcatgggtaaccaaaaccatggataagaggcagactactgtgtattttattatatgcatgttatatataatatatgtaatatatattatttgtatccatttggcaaacaattgagatttttatttcatgtagttgctttttgtactaatatagttatatggttgttggaattatgtcattaaaacacattaagccaagcatgctggctcacgcctgtaatcccagcactttgggaggccgaggcaggtgaatcacttgaggtcaggagtttgagaccagcctggccaacatggtgaaaccccggtctctactaaaaatagaaaaaaaatcagccgggcgtggtggcaggcacctgtaatcccagttacttgggaggctgagtcaggagaatcccttgaaccccagaggcagaggttgcagtgagccaacactatgccatcgcactcgaatcgagcctgggcaacaagaatgaaacttcgtctcaaaaaagaaaaacacacacgcacattaagagaaattatgtttgtcgttttgtttattctctaatttgattaaattgaacagaataataagtcacgtatggcaataccaaatattatgctaaaaataaaacactgaaagctgaaaaattcaatcacagattattggtttatatgacatcaggcttcaggctgataggagacgtccaaatgataggcttattttgttccataagtattgggcacggttcttagtataacaaagaaataaccgtggattgagaaattgttttcctcaccttcattacttaatagtagaattcccttcaatgtgccacttaatattccttgatgtcagagccttccatttgagcagctgaaattattgacacccctctcattcttcaaggatgtgttgtagggactgctgagtttctgtagaggtttaagctttgtgggaaatgatgttgagtatgacaatgttatcagcaacattgtcaacttcatggttgcctattgacttagggaaaagtggagaaaaatatgacaattgctgagtgcttagttgcagtagctttttaattttaattttcaagcatctgtgtataagcaaaagaatatacacagtgccacgtatcatacccattgacaagtttatcagattttaattataataaatattttaattaaaatgttttttaaaattattaattttaatgaacatcaaatttctctcttgtgatgtgataagggcagtgatagaactgacatttgaacgttcaatacacaattcggccaccattcaataggcttggattgtgcccatggttctgttctgtactaaagacacaaagatgaacaaataaaaactctgcccttgaagccatacagtcaaaatacagtgtccttaatctggggtccatgaaccatgataggaaaaaaattacatctttattttcactaacctgtaactgaaaatttgcatttctttccctttatgaagataagcaacacagaacggtattagcaatatctgtgaatttattaccaatatttttatatcaaatcctagttgttttggatatcttgaaaaatcatatgttaatatataccagtggttagtatactaatcactacttttaatttgtattaattattatgcttataactaatgtattaatagcatataatagtattatattcagtattttacaattgcaatataattaatttcctttgttttttatatgcttttagttttcattttgcacatttgaaaacagtctgggaagtgttccatatgcttcaccagatgccaaagggatccatagcacaaaaatagttaaggaccccatatctagaagagacacaggcaagtacatataataccatggtacagaaaaataacagaggcttgtaccatatgctgtgaaattgggcataactctctcagtccaaaggactgaagaggaaatttttgatttggccttgaagcacacgtgattgtttctctagtggtaacatgtgagagagggcattctaaaaaagagaaaagtaggtgcaaagtcgaagtcacccggtgagagcttgcagggtcagggaacaaagagcagtgtactgtggcaatgtaaacaaacaaagaaacaaacaaaaaaaccttttttttttttaaaccattgttgggcatcctattctgttttcatttgtcaatgtgcaagattgcatttgccaagcagtttttattaatcattagtgagtagaaactattctctggctttttattttaactgactatatttcatatagacaacaggcaagaaacatcaaagaagagatcaaagctctgcattagcgttttaaatctcattatttcaaacaacatctacctgtaaggggaaaaaaaaccgtaaatctttttcacctccccacttcgtcgttgttttcagacaacgatcagtcacttgtctggcctgtgggccataattggctacctgtaaatctcaagagactgaaccatgtaactggaataattttttttttttagcactacactacacggctgttattcagttataatggtcaaggaagctttagatgctgtacttaggctttctaaatgtgtgctttatttggctttctgggagaaatgtcaatgtgaatttccagattataatgaagttcatccagaaaaacaactatgatttaaagaagcagaagaaacaaaccggactgaaaaaatacactaatagactaagatagtgttttcaaactgttctagattaagacaattttgcttgcattctttgttgagcaagaaggttcacatcttaacttttccaataatcctctttaagaccgttattattggccttgatttcaaacagaaaccagcagggacctgaatggacactactagttaaccagtctaaagccttatgttaaagctaaacagttatctctaattttcaaaacaatagcatgagtatatattaaaaagtggttgatctagggaacttaatattccaggatgaactatactaaatgaaaatatgtaacacattaaaatgtggtcaaacaagccatctatagctgatagtacaaattgcatatatatctactttattaaaattttaactggccaataaaattgatactataattctaaatataatttttatttaagattacaagttttaaaattgaacagacttaggtttaaatcacttctctctcttcttctttttttttttttttccgaaacggagtttcactcttgttgcccaggctggagtgcaacggcgcgatctcggctcactgcaacctccacctcccaggttcaagcaattctcctgcctcagcctcatgagtagttggccctccaccatgcctggataattttttgtatttgtagtagagacgaggtttcaccatgttggccaggctggtctcaaactcctgacctcaggtaatccgccctcctgggcctcacaaagggctgggattacaggggtgagccaccgcggccagccaaaatcacttcttaaatgtgttattctgggcccagcacggtggatcatgcctgtaatcccagcactttggcaggctgaggcggtccgatcacctgagatcaggagtttgagccagcctggccaacatagtgaaaccccgtctgtactaaaaatacaaaaattagccggcctggtggcacatgcctttaatcccagctactcgggggtgctgaggcaaaagaatcccttgaaaccgagaggcagaggttacagtgagccaagatcatgccactgcactacagcctaggtgacaggtgacagagggatacttcgtctcaaaaaacagaagacaaacaacagcaacagaaaatgtattattttgtattagcttagctcagcatgtttgcttgtatgtaaagtagaactgaaaaaaaaacctaataaaattaaaatagggattaaatgcactaaaatttgttatttgttctacgtatttcaaaaatggtagtcattctaattatttattttagttaatggaaacattagttttattgttagtaaaacaatatattgttgatacaatatctagcataattttgcctcttaatgaatcaatcagcttgtcctttttattcatattttccttaattataaaccaattttttaaaagtcataatctatcagtagaaatggtactttattaaattcggagaatagtatcatttaaggaaaaatattcctagataaaaaaatatacagtactatgaaattcacatgcatttaaagtcattattaatttataaagaatctggaattataacctgaactaaataattctatttttttgctgaatgaatgaataaataaatgaatctttaggaacttgactgtcctccactaaagttaatgactccttcaacatattacacattctgttgctttgttctcatttctattataaatgcaagtttgcttttttgcatatggaatcaccatctataaattcatagtcaatatggggttttaaataatcattaccatggaaattatacttaagtattagttctgttggttggagattatgaatttctaaatttaaaaaaatgctgatttaaatttattatttccagtgccctatcctatttttttttcatatctgctactgccttcctaataaacttgtttagaaatatatcttgacagcaaatggtattttattcctaccctcttggcatgtattatacacaaactttgttttttgttgttgttgctgttttttttgtgtgtgttgggggggggggggggacagagcttcgctcttgttgccgaggctggagtgcaatgatgccatctcggctcactgcaacctccgcctcctgagttaaagagattcttctgcctcagcctcccgagtagctgggattacaggcatccgccaccacagccagctaatttttgtatttttagtagagacggggtttcaccatgttggccaggctggtcttgaactcctgacctcaggtgatccgcccacctctgcctccgaaagtgctgggattacaggcgttgagtcactgcacccggccttaaacttcttttcgaaagctttctcttttatacgtattgagttaattcctgtttgcgctgtgacatctacctgactaccacaaaaccttacagccacttgcttctgtaaatggaaaactgccctagcatgacaggatgtgggctgaagacataaccatatcgaaaacagcaagctttttggaaatctgtgtttggccctcaatttcatggcctcaagtaacttgataattttctatttctaatgcctgtcagccacaacaggatctgataaccaactaaaatctctgttggaagtgaataggggaaaataggtgaaatcacatttgatgttgtaagggaagcttattgaagacagtggatgtgttcaaaacattatgaggcaaataatgaggaggaaaaaatatgaggaaatagatcaccaggaagccctgtgaatgtttatgttttggctttacatgattactagtaattaaattagtgaaaaatattttatggaatattcaatatgcccttaatgtacaatttgctgagcaataagaatataagactacaaacttcctcttattggaatatacattttattttttattttgttgtacttcaatagctttagggtttcaagtggtttttgcttacgtgtatgaattgtataatggtgaagtccgggattttattgagccgtcacccgagtagtgtacgttgtacccaatatgtagttttttatccctcattcccaccccctccacttctgagtctctgaagtcccttatatcactctgtatgcctttgcatactcataagttagttcccattataagtgagaacacacagtatttgattttccatttctgagttacttcacttagaataataacctccagttccatccaagttgctgcagaagacgttatttcattgtttatatggctgagtagtattctatggtgtgtgtgtgtgtgtgtgtgtgtgtgtggtgtgtgtatctcacattttctttatccactctaaggtggattctatatctttgcgattgtgaattgtgctgcaataaacatatgtatgcaggtgcctttttcatatagtgacttatttttattttggtagatatgcagtattaggattcgtggattgaatggtatacctacttctagttctttgagaaatctccatactgttttccagagaggtattaatttacacttccaccagcagtatataagtgttctctttttatcttgtccatgccaacgtttattgttttttgactttttaataatggccattctggctaagataaggaagtatctcattgtggttttaatttgcattcccctgatgattagtgatgttaagtattttttcatgtatttgttgatcatttgtatatcttcttttgagaaatgtatattcttgtcgtttccaagctttttaaagagattgttttcttcttgctgatttgcttgagttctttgtaggttgtagatattggtcagttgtcagatgcagtttgcaaatatttttttccattctgtcggttttctgtttacgttgatggttatttcttttgctgtgcagaagctttttagtttacttagatcccatttgtttatttttatttttgttgcatttgcttttgaggtcttggtcataaattctttacctaggccaatgtccaggagagtttttcctaggttttctttgaggagttttatggtttcaggtcttagacttaagtctttaatcctccttgagctaatttttgtatatggtaggagatagggatccagtttcattcttccacatgtggttgtcccattttcccagcaccatttattgaataggctgtcctttgcccaatttatgtttttgtatgctttgttgaaggtaaattggttttaagtatttggcttcacttctggcttctctattctattccaatggtctatgtaggaatagacgttttaaaatgttgcaattggaactatggataaacctttaagataataatttttagccactgttcattttaactgggggagaatgggaaaaaagtttaatcactttaactaaatcagttactttgtttacatatatttagctctgataattacaaggagattcacttttgagtttgaaaagtagattctaatgcctaatgagagttttcacattgtctttgagaataaacactattttaggttattactgatatttcagtttgtgaactaataattcagcttgtgaattttacccaattttataaattcacttttcttacttgggcgtctgtgtttgaattaagaatggttaaatgtttctttcatacgcgtccgtgtgaagagaccaccaaacaggctttgtgtgagccataaagctgtttatttcacctgggtgcaggtgggctgagtccgaaaagagagtcagcgaagggagataggggtggggccgttttataggatttgggtagataaaggaaaaaggggggttgttctctggcaggcaggagtgggggtcacaaggtactcagtgggggagcttttgagccaggatgagccaggagaaggaatttcacaagacaatgtcatcagttaaggcaggaacaggccattttcacttcttttgtggtggaatgtcatcagttaaggcaggaaccggcaatctggatgtgtacgtgcagatcacaggggatatgatggcttagcttgggctcagaggcctgacagtttctacatgatagtctctttattcaaaagaaacacactacattattattttaaaacgttattaacatatttttctgtgctagaaaattttaagaaacaaacatttaagtgggctaactcatttagaatttgtaaaatatgacaaaactctaggagaaagtttacctgtgaaaggagtctgttatgtaaatcaatagtgtaattatgattcaataaattatataaattcctaatgagcactatcaatttttcttttgctaaaatctactgatattctacttttaaattactctcacttttagtgttcccctgaggacttatcagtttggaacacttaaatttgagttatcgttctgttcttaggaaaaatatatttaaagaaataatgatttattatgctagatttatcattatttttatttgggattgcttttaatgtgcatgagttacaaagacataactgtgagatcccattttctataatttttttagtgattccatacatttctgagtttacattttttaaaaattatagctcaaaaaatgcaagacataagtaagtatgcttttctaatgggtcatttcagtcgcgtccgtgtgaagagaccaccaaacaggctttgtgtgagcaataaagctttttaatcacctgggtgcaggcgggctgagtccgaaaagagagtcagggaagggagataggggtggggccgttttataagctttcggtaggtaaaggaaaattacaaagaggggttgttctctggtgggcaggagtgggggtcacaaggtgctcagtgggggagctttttgagccaggatgagccaggagaaggaatttcacaaggtaatgtcatcagttaaggcaggaacaggccatttccacttcttttgtggtggaatgtcatcagttaaggcaggaacaggccattttcacttcttttgtgattcttcagttacttcaggccatctgggcgtatacatgcaggtcacaggggatatgatggcttagcttgggctcagaggcctgacaggtcagttatggaaacacatcaaagtactctagaaccaaaagttaatttttgaaagaaattaacttaatgtacagattttataggaattctggacgtatttaatatcgtgatgctagaagaatgtcttaccaattaatattactggatttcttgttgtgtatcaagttgtaacagataccttaatcacctaccagataggctcattcctgtgtccattccaatagaactctgattttgctcagatctccatcctcacaatttcacagtagtcttcagtaaagaaatgagactaccccttgtcacagaaaatgaatcatactttaattcgcttatatgcttccataccacttgccatttacgggtttaagtatgtgcatgagatgcaacctgaaccaattaaacatcaagtaagtttttcttgccaatgaaaagcgttcacttaacaactaaatgcttgagcatttatatgtagatatatatgtacatatatacgatgtaaaatgtagaatgcccactgattcatttataatttgatatgtattagtatgtatttaataagctcttataagactgaatggactctggatatgaaataatataccaagtatggtaacacatggtaacacatggacaaattgtagtggaatcaataaagcattcagagaaatacatcattattatttattctcccactttaggaagatttcaatcctagcattaaatgtaacactgtcttttttaaaataaaacctccatttctaagaagttatttgatgagaaaatatttgagaggttatctgatgagaaaatttgaagaaaaaaattttaactgtacaaccagttaattagaactttgtcaaataacattgcctttaattcccagaaatccaatacattatgctcagtgaactgtaacacctgagtttttaaagtggaatacttaaaaaaaaaaaaaaacaaaaaaaaccagccttctggggtaatatctcctctttggaagtttctttttttccaaaattatacttaaaggacgattcttttaatgaataaattttagagttatctcaaggaataaatagaggaaatattattttatttcaaagagaagaatgtctattgtggcaaacaacaaacctgaaataaataaaacgtgacagtctatgaagtccgtgagcctaaagaacaatggttattttactgtcttagaaaagtttaggaagtttggatttgaattcaaactttaatttgaacttataacgtcaacttgaaatcatttggaataaacattgaaaaccttctttgaaagttttatcaaaggagaaagaatttgaataccaagaggatggaaaggttaacttctgttatctgaaatatcttcaattgccttgagccagtttaaaaataaacaagcttactgatatagagggaaacaagtctaccttgtgaatataatttaaaaaagagaaaaaatgtcatttaccatattatttacttcctcattttagaaaagggaataaacatttattaattatgcactatcaggcactacgcattcaacacacactatcacattagttcttcccaaaagccatttgaagtagtttttctttctttttttttcttcttttcttttctttttttgagagatggagtcttgctctgttgcccaggctggagtgcagtggcacgatctctgcccgctgcaacctccgcctccctggttcaagcgattctcctgccttagcttcccaagtagctgggactacaggcatgtgccaccacgcccagctaatttctgtattttttagtagagacggggtttcactatacgttggccaggctggtctcgaactcctgacctcaggtgatccgcgtgcctcggcctcccaaagtgctgagattatgggcgtgagccaccgcacctggcctgaagtagtttctcttatgcccattcatcaatatagataatagggttcagagagatttttcagtaatttacacaagattttacagctcctaggtggcagaatctagacttaaatttagatctgatccaaaaactgtattttcctagctttagtaggacattaacaatacaagtgcctctttaatatgcttaggaatgcatttttatttatatgtaaaaccaaataaacaaataaacgctgcgattgccaacaaagtatctttaatgtaagaatttcaaatgctgtgcaaaattatcctcactaactgctcttctggtcccacacttgtcacatggctacagaatatactatatctctctttctcttccagcagcttcctagtggccacacagggaccatcctatccataggttatagttgctttttaaaatctaggcatttcctaggagctgatgagattttagaagaggtgatattaacatgaaaaaattggtaggggtagatttctgagatattctatccaaattcaggagttttacaattataatttagttaaatattgtacttgatacacatataattccattaatacactctgagttaattgattttcatttattactcatggttttcattttttgttttttgttttttgagacggagttttgctcttgtcacccaggctagagggcaactgtgcaatcttggctcactgcaatctccgcctcctgggttcaagcgattctcctgcctcagcttcccgagtatctgggatgacaggcatgcgccaccatccctgactaattttatattagtagtacagatggggtttcgccattttggtcaggctggtctcgaactcctggcctcaggtgatccacctgcctctgcctcccaaagtgctgggattacaagcgtgagccaccgtgcccggcttcatcgtttccatctttaacaaagaaatacatgatatttaaagaaattttaaaagtataattttaaaacagagggaaagccacccacagctaaaacatcctttctctaaacagtttattttttccttaataaagttagatattttttggtgtctaactttgcattgtaaaacttaatcattacttacattgctccataatattctgtcatatggttttgctgtagaactgatactgagttggtgtgccccttgtaagaatagtccagtcattttaaaccagcatctgtttggattgggccagcatctcttccagtgtccttgagtcaacaatgccttaatggtttctacatatatttttaaatattacctatagatagttcattctttatcttcttatgttgcgtgtcagagctattacgttagagctattatgtaattttggcttttttatatatcattgcaattaacactcttgtccattaatctgtttgggttttttttgttctctagttgacatcttatgacaaatcaataggtgtgtaaactatgtcgatttttcttggctgtaaaaaacagtaaagaatgcttacagtacacgttgtctttatgaaaggaagttccatttgaagaaataattaaaaaacaatctgttttgcctttaatgggcaagatgaagagttaatgccactatatactaaatatcttaatctcgacatgaaatgagaactattctagagatatgtttctagatagatatggaacaaccacaagttcatacaaaatttgttaattttaagtcatattttggacttttattaactcatatggagtgacgaacaaatccttaattaatagcagacatatcatcatctctggatgcttatctatcagagatcagcaagaaaacaaacacacggcatgctaaaatgggtaaactatgagaggcaataagaaacaatattcaaagttgtgggtagggttaagggaaactaatgaatactgtgatgcaggtggcccctggctctggggacaatagaaagacataacccaccactaggcctaaaaaaggtaaaatgtgagggagcaattactagatcctggaaatggaggagctgaggagagaccgcccaacaagagctgtgacctttgaaaaagaaatacagccacttacaacctgagctcttgcaggtgtaaaaagtagaggtttctctccaaagaaactttcctacccatctaaatgggaataaatagtaacgtctcctagaagcaaaatttattaaacgacctgtgctaacattcttaaatatctactagccgtaataaagaaatcaatgtactttatgttcttagttcccacaatttagcctaaatatttgccctggcatgcttatactggtccaagcacgcattaggtcatagcctgttcctcttccttatttgaaggtgtttttacctttctcagcaagtaacttgtggaaacaagttacttcctccttcctttgttctcctctgcctttgtctcttttgaaaagttctaagttgctagccaatcgggacaaatacagaatgtgtggtcctgttccagccaatggaaaccggacacagcagtagagtaaacatgtcaggttataaatgaccctgtctcctttgttcggtgtactctcgtggcaaaactgctggcgagtgtaccctttctgcaaaaagtaaaaatgaccttgctgagagagttaaatttatgttcgagtgctgtttctttgcagcaccagggaacaagcattctgtttctaaataaacattgtttacatataacacagggaaggagcagtaaagaggatacagcctccacacacctttgaaaagcactcaagttataagtctttagtgccgtgctacttaagagaagggcttgggtttgccctaggttatggttatgctaagctcctcacaatttttataccacatccaatgacagcagacccattcaagcagaattggtttacaccatgagaaactataattcaaagaaagttagcaacttgctcctaggcatacccatattaaccaatattattcagtatatttatatacagcgcagagaacaacaattttaatggcattgtcagtattctttgatagataagcaccagttttgtgatatttaaaaagctattataggtgttgaggcttcgttttctcttccgctaaactgggatgaatctttctgaacagaacaaatacatatattctgtcctatctgggaaagattcaattatgtgttgcagtccaaatatgctgtattatatttacaggtaaaatcatactagcagaccagagtaaataactaggtaagttcctcttagtgacaataaaaagttatattgctcagatagtgctaatagaactttctgcaatagaaatgttctgtatctatcatgaccaatatagtagccaatagccatatgtgactattgagcccttaaaatgttactggtggggctgggcatggtggctcacacctgtaatcccagcactttgggaggctgaggggatgaattacctgaggtcaggagtttgagaccagcctggccagcatgatgaaaccccgtctctactaaaaatacaaaaattagccgggcgtggtggccagtgcctgtaatctcagctgcttgggaggctgaggcaggagaattgcttgagcctgggaggcagaggttgcagtgagcccagatcacaccactgccctccaggctgggcgacagagtgagtgagactctgtctcaaaaaaaaaaaaaaaaaaaaaagagtctcatgtataaatactgttttggacacacatcgttagaagacagtaaaggtgacactgtaaaaattttaaatcattaataactaattaccaccccaatgtaaatttcactgatcactgtcagtattaattctacagtaacatctgtatcaacaaatttccatatccctttcactggtattagggaggagatatcaaaagatggtaaacccagagcataaacttgtagatgtttggtaatgaaatgggactggacctatttgagattgtttcacaattttaaatcagggattggttatatagagctttctttcttgtattttttttctgcttctatgtggaaccatctagaatgcttgtgttattgctttaaggaaagtttttaaagggattcttaaaaaatacagtattttcctagcatatctctgaggtgataaaagtctaagaatcatagtttatgtgttttattcagatccagctcattctctcaactgttaaataagattcttgagaacaggtattattttttacattctggaggatccttatagcacatagaactatactgagaccaaactcgataatttcttataattttgattctgctggtaaaacacaaacttgatattgaaaatttgaatattctggacattataatttgcttatgaatcattctgtttgatattcccagataccctttgctaaggcagctcagaagggaaatatttgttcttgcagtttgtgtggttacgtggtttgttgtaaactttccctttgacctaaagaaatattgtccctttggccaggtgcggtggctcgcgcctataatcccagcactttgggaggctgaggcgagtaaatcgcttgaggccaggagttcgagaccagcctggcccacatggtgaaaccccatctctactaaaaatacaaacgattagccaggtgtggtggtgcatgcttgtaatcccagctacttgggaggctgaggcaggagaatctttgaatctgggaggcagaggttgcagtgagccaagatggtgccattgcactccagcctgggtgacaagagcaaaactctgtctcaaaaaaataaaaaaaaaaaaagtcgtctccaaaatatagcatggcttcaaacagatcgcattatctctctgaaacattttaacttatagatttaaaaatatatcttacagaaacattatttagaaacacaactttagtttacctacctctataaaatctccagagccagagtaaagattaaaatatgcattcacaaagagctttttaaatcatctctttattttacatctcccaaaaattctggaagaaggccgggcgcggtggctcacgccagtaatcccagcactttgggaggccaaggtgggtggatcacgaggtcaggagatcgagaccatcctggctaacatggtgaaaccccgtctctactaaaaatacaaaaagttagccgggcgtggtggcaggcgcctgtagacccagctactctggaggctgaggcaggagaatggcgtgagcccaagaggcggaggttgcagtgagccgagatcgcaccactgcactccagcctgggtgacagagcgagactccatctcaaaaaaaaaaaaaaaaaaaaaaaaaaaattctggaagaagtagtgtttgatttagcactcttaagggacaccatacatttgatgttgttaaaatagcttacaggtttatattagatttctattatctatcctgtcttcatttttggatatcatgtaaatatgttagataaataaattgagattgatttctaacaatttgtatgcattttgagatggcttagaaaacattcaatgcagaagttgatactgtgactcataccaagcatgctcctttgaatataagaagacaaaacttctgaaatgaggcaaatttaaaatatgacaggtttatattctggaggtagtgctaatagcccccaaagctactgatacatgagtttgtacactacagaaaagagaattaaaaagaaagtttgcacttcattgcagttccactcttgattattaatataaatcgaatgtaaattagtgaacttcctgtaaacacaacatgagcaatgactaatattgatagtctactcttaggttcccttgaaattgttctgcttgtctgataaaaccataacaagggacataaaaagattgttttaatatgttgagtgaattgtacatgaaaaattacattcccataaaaggctgatctatgaatgctaacatttatgttgttcgctatttctgtgtacttataccacccgtgtgagtgttgcttgatttggcagaagtaatggaattttaaaaagcagttgcatgagcaaatatatctattttccatatgtacatatttgcaatttagcaagtcatttgcttttgtttaaatattcaaaacgttgtcatatgtgtgttgtacacattaagattttatgtattttaaaaattatatatgtgtattgatatatttgtatgcacacagagcaaagcttgaaatagcaaaaggtaattacatgcatattgtatatactactttgtattaaaaatgtagtttattgatctttaaaaccaaatttgtttttgtaataaagagtaataaaaaattagattatgattttttcctttcaaatatgtttagaatttaaaaatcttggctacccctttaacctaaaatctgtcttacttacctcaaaatgcccttgatcccaactacatgaaatttcttgctctttcttttttttctttttttttttttttgagatggagtcttgctctgtcgccctgcctggagtgcaatggcacaatctcagctcactgcaacttccacctcccaggttcaagcgattctccctcctcagcctcccgagtagctgggattactggtgactgccacgatgcccagctaattttttgtatttttaggagagatggggtttcatcatgttggccaggctggtcttgaactcctgacctcaggtgatccacctgccatggactcccaaagtgctgggattacaggcgtgagccaccgcgcccggccttcttgctctttcttaaatatattatgtaattttatatagcacatgcatatttctgtgtctgggacacccttcctccctgtatctactccttgctatttcttctagcctaatttagatccctctttctatgtttctctggctcttttttcttaagatttgtcaagtcatgctgaaactattgccttgtctttctcaaaagactgtaagttcattgatggcagaacttaagtgtatattagtatctcccagaactcactcagggcctggcatagagtagcataaaagtcagtgttgttgaatgaatgaagaaatgaatagaatgataactgctttctacaggtgattgtgtgtaaacaaaaagtcatatgattaatccttctatgagcaaaagttggctaagattacaattaaatctgaatgtgaagattgtactgcagaaaaaaaaaacacacattttcaatagttatgtcacaaaagcaacccatcatgatacaagtagaatctgcgaacatttcttttaaggtgcgtataaactcatggcaaatttatgttgcattagtctttttgatgttctgaactttcataaaaaatcaacatagtatttaaaatctattgtaaaatatattgaagtttcattgattttattaaaatattaattcctttattttatatctatatataatataatcaaatctgaaaactcatcaagattatggcctagttgattacgtcttagttattatttgtacttttccatagccaacatgcaataaaagtttggttctagataattttttcctgttttacaccgtttcaatcaaaacatgttacaattgagtaaaacaatctgaaccagccttttataatacatgaattccaagattgtactaatttgtcagtttttgcttactgtctttcacaatgatttggagacataataaaatgtgcaaccaaattagtgaaaataaagaagtatatatataattgactagagccaaatatgtatgcagatttaaggcctgatgttttagttcactcattcaaattttaattaaaaacagtacataaaaggtgctagttgctggagtatgatgagaaaacaaaacagtaacaagacaaaaactgaaaacatgtttcctatccttgtgaaacttactgtcaatggggaagacgtacactcagtcagagaaatgttaatatttacaacgtaaagtaatatttacattatctgtattcagaaagagaatatcaaggaagcctattctgttggagtaaagagcttatgcaaagctcctattgtgggaaggaacagaaaggccagggtaactatatctaagaagaaaattacaggctgggcacagtggctcacgcctgtaatcccaacactttgggaggccgaggcgggtggatcacctgaggtcaggagttcgagaccagcctatccaacatagtgaaacttcatctctgctttaaatacaaaaaattagccggacgtggtggcgggcacctataatcctagctacttgggaggctgaggctggagaatcgcttgaacccaggaggtggaggttgcagtgagctgagatcgtgacactgcactccagcctgggcgacagagcaagactccatctcaaaaataaataaataaaataaaataaataaataaaaaagaaaattacggtgctacaagacgaggaggaactacacagaagcctcttcattcaagaaatgaaagctcctgagttcggatatctatcttaaaagcagtagtatgctattgaagaattgtaagcaaagggtgtcttgatcacattcatctgtcaaatagctctttattggtgaggttatgagaatgtattgaaagtaatgtaatcaaagcaaaagaggtcagttgcttggattaagggtgttggctaagaagataaataattgattcgtatgttattctgggacccctagaagccaaagaaaacggaaaataagaccaattataaaattcttattttcagagacaagaaatgccttcaggaaaagggaatttttttgtataattgtctactaaaagaaaatgttcacttatgactttagtgtatatagaccaatttatttagctttaaagtgaaattaatttcaggatatttggtagtaagttttagcaaaacctaaagaaaatagtaaagcacacatttctgttattgatacataatgatcagatatatttccatgataaatgtgatattataaagcacaacttttaaaaaacatttttctagagattatgccttaatttcagcctgtggaacatttctttaggagatattcatggctgctctgtgtccaactacatttgggagtcacctcatactgaatccttttatatactgggtcacttgcaaaggcttaattgagcatttgactgtcatatgccacagaatggatcggacactataaataaaacacaaaagagagtttgtcttttctgggcttcatcttcttaaaaaaatcagctattagacaagcatatgtaagtagtcaagaattatgataaattttctaaataaaaataagtgcatgagagagcgtaagagtatttatttaattcaggtttgggatcaggaaggtctcactgtggaatatttatctaaaatgtaaagggtgaaccaagaaaacagtgatgtggaagagcattagaaaatctggaagaaacacatgtagctgaagcaaagattatgcttattttgaagaaccttttagctgcagtaaataaaagacaccaaattacctccaattctgtaaagcagccttcatgactattcttcactttgttcacaatttattatctccagcccgtactaaatagataacatcatctcctacttcactgggggcttgaagggagaaaacagtgaactaaacttttacaagacattatttgtccagctggaaataaaaagtagaaaaaacatagaactttctatgtatagaggttataaagaccttaattgctttttaatttgtttagttcatgcatcctttgtcagtctgataaaagctgtgggactcctcagaaaaatacacagtgaatatcctttacatacaaccttttacataaaaatccagcagttcaaatgctcctgcaatccattcataagccattcataatccattcctaaaccagcttttggttaagtatccctgctttcaagtatcttgataaaatagtaaaaggaccagaagatacataaatataaatagaaaagtaaatagaagtgtgtgtctgctttactagaattttgaaatatcatgtttaaactataaattttaaatttagtttatggcttaagtacagatcatatattcccataaatgtgagtatatacatttatgtgcaaaccttcgctcacaaactcatatgcttagtgtttgagatttctcagtcctggactgagagttgggaaaaagttatgttttctttaacattctctcatagaaccaaaataataggagaatcagaaaaacataggcctttacattttggcttgagatcagcttctcgccatacctctagtacctcagacaaattacttaacatgtttgtacctatattttatctactttaaaatagaaaagaatacctaacacaaattgttcttatgaggataatatatgaacattgactgaaagatttaagctttttttacttaaaattatcctgttatagatagccttttctcaagaagtacataaaaataataatagtaaagctttgtgaccacaaaaagctacctacagtatatgtatgatgtttaacatatataacttgatatatataatatgacatatgcttgatatatataattagacatatgcttgtctaatagctgatttttttaagaagatgaagcccagaaaagacaaactctcttttgtgttttatttatagtgtccgatccattctgtggcatatgatagtcaaatgctcaattaagcctttgcaagtgacccagtatataaaaggattcagtaagaggtgactcccaaatgtagttggacacagagcagccatgagtatctcctaaagaaatgtatatatataatatcgagttatatataatatatatgttataatatagaatagaatattctataataatatagtatagaatagaataatattctatactatcatttaatatgaaactcacatagactatatttgtagctgtgggtaaatacatgtatgtaattttggtatatatacgtggcttatgagggtttttatggagacatgaatatggtgttaactaaattattataagtccaatgagctttgtgagatggccagtcgaagcaaacaaattccatgtatctccgaagccatttcctctagattgactgaaaaaaaatcaatttcctttaataaacatattttacaagctttgtagctatcacttacttcgtggttaaagtttacatctatggaagattacacagtaactttgtgctcacatgattgagtatcttaggggtttttatagatacatacttaaatatgtcagggaacttcatagttgtatgattggatgtactgggaacttcttgctccttctccttaatttgtgaaatcaagagacagagttactgcaaatttaaacttgagtaagtcctttgctctacttcatttttctcccgagaggcttctttttttttaaacgtccttttgtagaggcaaaatgtaaatattctctgaactctacttctgtatcttaccgtgaagaataataattagctcattaatttcaatttttgtaatatgcttaggtcaacaagattacttctaagggctcctcatcaaatacccctgtgtactttaggttcttttacttttagcaaggctgattcaaagttttttaattcataacttttttaaaaatttttccgagagtcacattgtatctcctttatactgacgtttattatcaggctgtttttttttgagatggtgtctcactatgatgcccaggctggcctggaactcctgggctcaagttattctcccacttcagtcccccaggtagctgggattataggcgtgagacacaattcctgggtttatcattttgtaaagctggagcaatcagttaagaatggagaagcaacagggccgcacggtggctcacgcctgtaatcctaacactttgggaggccgaggctggtggatcatgaggtcaagagatcgagaccatcctggccaacatggtgaaaccccgtctctactaaaaatagaaaaattagctgggtgtggtggtgcgtgcctgtagtcccagctacttgggaggctgaggcaggagaagtgcttaaacctgggaggcagaggttgcagtgagccgagatcgtgacactgcactccagcctgggtgacagagcaagactctgtctcaaaaaaaaaaaaaaaaaaatgaattgagtagcaatagatatcatgagcctcctcatggcgccaatattcgtttgaacccgccaacttcacatttagatatatgtgtctacgttgctggatgggccaggctatttgctcatctctcagttattttactatcctgtttcatctttttccataacactgttacactcacctttttgtgtcacttttaccagagccagtcattaatgaacaagaaatgtctttatttcatttcaaaaaagcaaaatatttctttgaaaattaaacagttaatttccaagccactcattaaagttattttattataagttttaatatcagaattataaaaatatttaatatgtcatctggtaattaatatttattcttttttttgagatggagtctcgctctgtcgcccaggctggagtgcagtggcgcgatgtcggctcactgcaagctccgcctcccgggtttacaccattctcctgcctcagcctcccgagtagctcttagcagcttcttaattaaagaatccatagctctctaatgcacatacgattgtgacatatttattcgttactttaagatcctcccccagtgttgaattctaccaattgcaaggtgcttccatggctttggacaaagtacagaagaattaaataacttcacagccttcatggaattcacagtaaggcagatcccatattaactcaattaaaatatatttagtcaaagccagatgcagtggctcacacctgtgatcccagaactttgggaggcggaggcggatggatcatttgaagtcaggagttcgacaccagcttgatcaacatggtgagacccctgtctctactaaaaatagaaaaattagctgcatgcctgtaatcacaactagtctggaggctgagacaggagaattgcttgaatcctccgggaggtaaaggttgcagtgagctgagatttcaccactgcactccagcctgagtgacagagactccatctcaaaaagcaataaaaataaaataaaatatattgagttgaatactgaaataggggtaactttgggaagctatgggccgcaaagcagagaatgatgcattcagtttgggggagctaagattagtttcgtaaaggaggtgacatcttgaagacatctagaatttcaatagacatagaaaaaattcatcgtaagcagagggactagtgaatataaagaagtcataaagatccaaaaagaactcagaaataatcaagaaggtgagggtagctacatcataattataagagccaactttattgagtacttcctttgtcaccatgtgctaagttctgtattttaatatcctcattgaatgcttgaaataatttctatgaagaaagatctgttttatctttattttactgggaggctgtgaaatatgcctaaggtcacacagctatcacatggcaaaaacaagattcaaacccccacagtttctaattttaaagcctcagcataatgaacacagtattgtactgaacagaatgaatgaatgtgagtagaaaagacatttctgagaacaaagctggaaatgtatcatacaaatcaaataaacatttcttgagaaatccttggggaagagggcaatataacctctcaaacagtagccagaatcatcaacacaaatatgtattttaagttctcacaattggtctcgccatatgaactaaatgctagatatttacttgcttaatgctaccaatgaattttcaaatctttccaaggtgttaataattttattgcttttttataccaagagcaagaatcaaatgttagttgctattgatgtttacattttaaataacaactttaatttagcctacaatatttagcaattacacaggaatcctctgaaagcttttaaccagccccagaagtaaactggctttggatgctaatctcttgagctttcctgactgacaagtttcctccctagaggaggggaattggcctgtctcctaaattttgcatggcctaaagcagtgagtttagaagcacctgtgtttcctggcaacaaacataacatttgtggaaaagtctaattatttaaattcctctgcatttttctaattgaggataaagtgctgcattctaccttcgcattcttattttattccttggccctttaaataaaaaaatacataaaatgatgtggtcagctaaaatatattggacaaacaaaacccccttcctttatctccctctatcgctctctatgtatatatattatatacatatataaaatatatataaacatatatatgaaaacagatatttgtgtgtatatatacactaagagatattatagtttaaatattttttaacatacactttaaaatctaacagcttggattttaatattgggtcagtctttctaaagtgtttaatattttagtttggaagtattaattagcaattcatgaatgagtaattaaaagtgctttagggggcctttcacatcctataataaataccaaaccttttaccacatttcatactataaaatcttggaaccccattatataactatgagttattaatttctgttacctacttttaaaatgggaacatatgttattaacaggtgttgctttgaaatctatattagcaaatgttctaccttataattagtttttgacttatcacaaaaaagtattttattttttttaattacatagtcacatttcaaggttaactttaaaaaattctaaattatctgattttcatgggaaagagatttgatatttgtgccttagcattttggtatttttctctttctgtatagcaaacctttgaatgatagtctgtctgaattcacagtgaagaaaatgatcagaatattgactgtcaacagataatttagaaggttcaatcctatgataatcagggatattttccttatgtaaatgtgttgatttatcaagttcagctatgtcattgattacatctaggcttcaggccttctgtgaactgccagctctactcaattctggcttgtgaatgttatcacatattttagtcaaatcagaggttatattatacacatctgacatttttctctttgtactaataactttttttctttttttgtttttacatcatggcataagatcaacactaaattttaggagtgcatagtaagtattaccatagtgtaatgctatgccaattgttttctaacttaatatttgcaaaactgggttttatggttgtttctatgcgaattgagtgcctctacagaattttatccctgagagtatatgagtggtgagtgataagagatactgaatgtctcagaacatactagcatctgacagcctattggtaagatagtgtaagtaaagaggataaggaaaatctgacttgaaaggagaataaaatctgattggacagtctgtagccaagtttgcatattatggatttacaaaatgaggttgttttgaattcttgattaatgaaacataaactgagttgttttaatattgcgtgccatttgaaataaaatgcattttgtcacaaccctagaaatgggaggttatgtgttgtaaaatattcttgttcccatctagaagacaccatattttatagagaacagtggctgaagcttgttttactaggaacaagtatggtgtaaggaaataacaataattaatactggtggcacttagtgctatagtaaaagtaaatttctaattagaaaataattaccataaaatactgaattatatctttgtaaggcctttagaaattgaatcactaatttaatatataagtaagtcaatattatttttatgagaaaatggacaacttacgaagttgttgttatgttttcaggccatattccatttttcaccaaacaagttatttccctgatacactcacttaaatcatcagtaatacatataggtttaaaaatgttttgtacaattctgaaagcctatcttagtttaatgaaacataataccataaagcttccctttcctccaacatttgagctacaataaaacaaccttgtacaactgataacaattaactcaccacccccaccccattgcagtcattagaattcattactaaaagctcatttgtttatggtaaaataaagtataagggttttgaaaccaccactgcaaaattaggactgagacagtgaaagagatctaacttaactgactccatcttgcttctaacctccactaatttatagtttatcgtttaaacaaacatcataacagccctttcccaaagcagaccttcttgcctggggactagattgcctctgtaggactaacatcagccacagtattagaaattatggtttaggagtcatgcagctggaggcaacaagattctgacccccaccaaactgctcctaagatcagtgcttgagataatttgcagaccctgcacttgatggatcagctggcactacccatatcaataaactggctcatctgatcttgtggcctccacccaggaactgactcagcgcaagaagacagctccaactccctgtgatttcatctctgaccagtcagcactcctggctcactggcttcccccgacccaccaagttatccttaaaaactctgttccccgaatgcctggggagaccgatttgctgatttgagtaataacaaaactccagtgtcccacacagccagctctgcatgaattactctttcttcattgcaattcccctgtcttgctgagtcagctctgtctaggcagtgggcaaggtgaaccccttgggtggttacaaatttgggggctcacccaggattgcccctgtggctacctgcctgttgtttggtggccccctttcagtgatggatccagaaggcagcccaagtggctgcctaattctcttggactgggggctgactctgttactctgtctactggtggggtattccaacccaatgtgcgtggacttaattgcaatggaaaaatagtcatggggagatgtcccttaactgtagccctattacagggtatctgtagcctcatggtggggtgtctatctgtagctccgttttggggtgtctggattggtgagtatcctaggtgctgccaatgcctgcttcattctcctgactggttctgtagccctatggtggggtgtctgtagccccattgtggggtgtctgtagatccagcatggggtgtctctgtctgttactccattgtggggtgtctgttcagctcctgggaggtctcagttcgctctttctaactagtaggaagactactggtttgggagacttctcttcaatcaggaagattttgaggaggtttctcatacagaaaataggaggatagtttggaagggatactcttggacttcttggttagggatctgatttggaaggccttctgtccctcttgtctttgcatgtgtttaaatatgtgaaagggatctcagaaggggttgctgatagaagtccagcatgcctaactcagagaaccctccttatttgtctggtcacattcagtgagctctaaagaaggctcaacagtcctgtctctcagggtgactatctgctctttcccttgcccagagacctcattgtgaattaccgttcagaggtcatccgtccccacctggtgtggatcaaagacaacagggaccaagatgaaaaattttgagctttgccaggctgatattgggtgcggaaagaggtgactaatgtctgttttgttatgtgtattttgctgggttggaaaatgttaattcagttccccatgcagcccgttgggcagaatcttgcaaattaagaatcttgtttatggttccataaaatggtaaagggtgattttatcttgtaaagtggcttaaaccccacagctatagcacaagcaagcagggtcgtaagacgccactccgttcttctggaagctgcagagaaagggaacccagaaacctggcatcccagcaataagggtaagaaattcttatcagtcaagtttctggtctctctctctctctctctctttctctgcattgttaaatagtaaactatttgtctcctctgcaagggtttggttaatagaaagaaggatttgtgagactaatcttagcacatctgatgtagtttgtgctaagaatttgtctttctgtgttatgtaatggagagagggatatcacgtgatagaacgtgggttaggacacccataagtctgcttttcaagtcagcttgggaggctggtcagctacaaactttgctacaggtccctgaaaccaatactctatgaaatttctctgtcttgttttgtgtccttaagagcttaaccttgtgaccatgtggggatactttcttttggtttctaccatccagaggacaggaattttggggttcatgtcatagttactcctaagatttttcttgagcagttaaaagccttgcaagcctgaaactggcttctctaggctccttctgggaaaagcagtagaaatttctcaacgctgtatatagctcagtagctaaggctttgtcttttgacagtggtggcctgggttcaattgttggcttctggaatgattcctttctgatttgttatttgtgtagctttgccatttattaagtttcttttctgatttcctctcttgaattttcctttctctggactaccttgtggagattctaaatcttgtaaaaagaaacttcttactatgtctttgcagcacctaggaggtttcctttggtaaagttcagaagctaaaaatattgtccacttggcatggctaaaattaggtaataagagatctaaaagaatttcttttttaaagagcactatggttaaaagtcagcttaattaagagtggataaacaagctatagatatatttaaaaggcctttatgtttttctcttcttggaacttgtttttttggaaaaagttttttcttctcagccgactgaattatttttctccatttttttctcttttttaatttttttgtcttgccactcttaacgcacacgtgagtccctaagataacttctggtagcctgggactcattgggaaaaacagaggaggcaccacagaacccgttttagggaaaaaaaaaaaaaactgttttccacatgaaaccccaggaattaaaaacagatggatccctctcaaaatcaaagactctgctctgtttttcattgtgttatctgatggttttgagttttggggatatcagaaattacttcacattatgagggagctttagtgtgtaataactagataggaaatatactttaagggatggctaatggtagttatacagggatacttgactctttgcacacttggatccagagaagcatgcttttggtcacccggaagataaggaaacattcctcaccctccactgggagatcagactcccatgaaggacgggctgattacaaaatgggctgattgactttgggttgccttgcaatgaaatgcagggtatggccgggtgccgtggctcgtgcttgtaatccaagcactttgggaggctgcactttgggaggccgaggagggcggatcacttgaggtcagcagtttgagaccagcctggccaacatggtgaaaccccgtctctaagaaaaatacaaaaattagccaggcgtggtggcacatgcctgtaatcccagctacttgagaggctaaggcaggagaatcccttgaacccaggaggcggaggttgcagtgagctgagatagcaccactgcactccagcctgggtgacagagcgagactccgtcttaaaaagaaagaaagaaacaaaaataagaaaagaaatgtagggtagaagcactgtactgtcttctcccgtagtatttctctccttttgggttgcagtataaaatggtgcccttaatttgggagttctgtctttgccttcagctgtgattaagccttagaaatgcatactttcctggccctgttcctccaaaggctccaccctgaagccagtaatctgattaagaaactggcaaataaaaagtcttatcagtgccaaatcttctgtctgtatttacatgtgtttttgtgtgtgtgtgtgtgtgtgtgtgtgtgtgtgtgatgtttataaaagagctctgattaattggcttggaaaataagtgcttaaataaaaaaatattttgtcagaaaaatagaaactttgatgactttttgttcacatgactttagtaatcttttggcaataaagacaattttaaagattattgttaaagtaaaatatcttgaaaatgtagacatttggtctaaattaaggtcagctatcagatttgctaaattctttaaggtcaaactgtttccttgactttggaaaattgttcaatttatttactttggagcattatattatagatgaggcctggggacacgtggagagctatgcccctagctatgctgaaaagagtcagaccttatcttcacttctgtctgatgtcctaggctccatccctagcatataattaaaatagcttttttatcaggtttttcactaaaaatcaaagttgctaagagttaacattgtaacatgaaatcgaggttactggagaaacagttttacatacaaggtgtgtagggaatgtgtttttggtgaaagataataaggcataggaatatggcttttgttgaagagaatgtaattttgtctagttcagaggttttaaagactgtcttaaactaaaagagtaacggaacgaaactgagggtttaagcaaagtgaaaagggtttatacagggttgatcctgaaaaaaaaaattctgtgggtataaacaagttggctaagatttgaaaaaggttatttagctttttctataggttaaaatattaaagtcatactgtggggccagaatctgggcccatgtgtccaaataacagggtcttcttagaaaattgatctgctgtttaatggaaaattataaagcgttctaaaaagtttatgagaatgtcaccttgtggtcaaactaattaaaactggatagatacataaaattttatttaaaaactagctttagcattaaagatgcactaatgcgaacatgaaatttggttttctcttttgaagacgatttttttgtaacgttaaaagataatgaaagggtttggctttctcctttgggtaaatggcaggggaaaaggggagagagaagagacaaattcagttatcctcatgctgtctttattgggtcttgtttggaaagctaagtctcctctgtcagaataaaggtttttcttttaagattttggagttatcgttttggtcaaatgaatgacttatggtgacctgggattctattttgtgatatccagtgttttaaacctttgatatttggcaaactttccaaaatcaaattataaattatgtctctttctggcctaatcttttagatattaggtcctctaaagtccaaaaatgacatttggcgtattttgcataaaaatcatacaggaaacattgtcaaatatgaaatggtgtttggctttttgggggctatatttgtgtaaatatatgattgacatatgttctgagattatgtaaaactcctataattctaatatgacttagtatatgttatcagtaataattgtaattatgttaaatggctatgtgccacagaggtaacaaatttccttgtcgattgtgtctttaactctggctactctacaatgtttgtgtcgtccacaggcaattgttgtctcatttttgtcctcttaaaagatggttttataggccgggcatggtggctcatgcctgtaatcccagcacgttaggaggccgaggtgggcagatcacctgaggtcgggagttcaagaccagcctgaccaacatggagaaaccccatctctactaaaaatacaaaatcattcctgtaatcccagctactcgggagaccgaggcaggagaatcgcttgaacctaggaggcggaggttgcggtgagccaagatcatgccattgcactccagcctgggcaacaagagagaaactctgtctcaaaaaaaaatggttttaataccagctgtaaaatgtaacaggtggtcttaaatgcaggtttctgattaataactctggagattgtgacgttagaatagaaggaaaactttcaaatagaagagtgaatggtgtttggttttctttggactgtatttgtataaatatgttattagtgtgtgttccaaaaattatgggaaacttctataattctgatatgatttcactattaataattataattgttatgtaaaattgttgtgtgccacggaagtaaccaaaattcctagtcaattgtagctttaataatggctgtagacttttgtcatccacagacattttatcttgctttggtccttttcaaaaggcagtttataatcggatataatactctgagtgcaggtcttagataactttaaaaattatgctcttggaatagagggaaaaaacatctaaatgtggcaaactgatgtgttaaacattgctaatccttttgttttcagagtcaacataacttatttctttagagctatttgccacttttaccgagtgagtaaaatacactcagtgacaaattttggagcaaatttgtttctctctacctgatttctctagaatttggaaaccatttgtgagtattctcaatttatgacagtatagttaattgcatacgtgcaataagaatctgttttcttttgtaacaggacaccattggagaaattggtcattttaccaaggctttgactggaatggcatgcttcctttaaagaatcaaagttgacttatagagccatttaaagcccgttggggaatctggcctcataccttgtccacacagagtccctgtacaaggttcctgacctgtggtaagtaaagaatgtcactttctaacaggcccaggaaccccaagttatcttgggacctcaagaggagaggactttggtcaactcataggtatttgagggtacaaacccatggctgggctcggctttcaaaaagtcttatctgagattcttcatggaacagagttccatcaaagccaatttaaaaagcctaagtgaaaaataattattcttgctgcacttcatgcaaataatcaggccaagtacagtaagactaaaatgcattttataagcaaatcatttctatcatgatttgtttttaataaaaatggggactgaacagagaaatattatgcttcaaaagaaaatctatagtaaactattagctattcttgaggttaattcttcagtttagactaaattctaaattgtttgtgggttagaagttcccaaactaatgatttcaaatgtttgcttttaaaattgggaattgtacttctcatcctaggactcattataccttatagtaggctattcacataaacactgtagtaaaactatagatgagagtaataatgtttctgccacgcaagccttggaagcccaattaggcctgcatgaatccactcaaacagttgcaaagcagttccactcttctcaccttggagttcgttcccattcccgctacttcccccatcagcaggaagaagccagagcgatcgacggccttttcccatctttatagcctataccttagggttaaagtgttagaaaacccaaaggaagggattgaaaccacctttgcaaaattaggtctgagacagtgaaaacaatctaacttaactgactccatcttgcttctaacctccaagctgtcttcgttcattcctgggcataggctgaactaactttgggagaaacttagtttacagtttaaagatggtaacagccctttcccagagcaaaattccttcttgcctgggacttgcgtttgtaggactaacatcagccacagtgttagaaattatggtttaggagtcatgcagctggaggcaacaagattctgacccccaccaaactgctcctaagatcagtgcttgagatattttgcagaccctgcacttgatggatcagctggcaccacccagatcaataaactggctcatctgatcttgtggcctccacccaggaactgactcagcgcaagaagacagctccgactccctgtgatttcatctctgaccagtcagcactcctggctcactggcttccccccacccaccaagttatccttaaaaactctgctccccgaatgcttggggagactgatttgagtaataataaaacttcggtctcccgcacagctggctctgagggagttactctttctctattgcaattcccctgtcttgatgaatcggctctgtccaggcagcaggcgagttgaacctcttgggcggtcacagttttgacctagtaaagctttcattttcttgctttgccctatggcctaatttataatatacataaccaaaagccttagcttctagtaaatagtatttattaaagtgctatataaacgttacattttagggtaaccaacttttcttgttttatttttgtttgtttttgtttttcaggaatttctcagttttaaaatttaaagtcccatatcccacaaacctgcttagcccccaggcacaccagacactcgatcaccctaaagttctagtttattttgggatccttgcatcccttaaaattacatacaagatgttgggtatacatacatactgcaattgccatcaggttcaccttgcccactctctagacagagttgatttatcaagacagggaaattgcaatagagaaagagtaattcatgcagagcaggctgtatgggagactggagttttattattactcaaatcagtctccctgagcatttggggaccagggtttttaaggacaatttggtgggtggggagcagccagtggtcagaagtaatgattggttggatcagagatgaaatcatagggagtcaaagctgtcttgccctgagtcagttcctgagtggggggtcataggatgagatgagccagtttattgatctgtgtggtaccagttgatccatcgagtgcagggtctgcaaaacgtctcaagcactgatcttaggctttacaatggtgactttatgcccaggagcaatttggggagaagcagtatcttgtagtctctagctgcatgactactaaaccgtaatttctaatcttttggctattttgttagtcctacaaaggcagtctagtccccaggcaagaaggaggttggttttggggaagggttgtcattgcctttgttttaaaccataagctataaactaagttcctcccaaagttatttcagcttacccccaggaatgagcaaggacagcctggggcttagatgcaagagggagttggttacatcagatctctttcactatttcagttataattttgcaatggtggtttcaatacctgaatgcattttcgtaagacaaagcttcaatgccaaaacatctaagatatcccaatacggtattaattcatttgctcggtattaattcatttgctgttgctataaaacagaatacctgaaactaggttacttatttcaaaaaggaacttatttcttacagttatggaggctcagaatgtatctgcacaataggttcttctttcctgctgcccaggtagagctgatttatcaagacaagggaattgcaatggagagttttatacatgtacagccaccagctaagcagaagatcagagttttactattactcaaatcagtctcctcaagaagtctgaggctagggttttcaagatcggtttggggaaaggcatgtggaaagctacgcaataggtgcttgctgctgactggtagggattgcaatcataggactgtgggcaagggtcctcctgtgcactgagtctcttctgggcggggccacaggagcagttggcaggtgcaggtggagccatcagtcatcagacatgaaatatatctgaacagatatctcaaaaggccaatcttaagttctacaatagtgatgttgtctgcaagagtagttggggaagtcgcgtgtcttgtgacctctggaataatggctggcaatcctgtatgtctacaccgcagcagaatttagtttcccctatcctcctagcctggtggtctctcattagctctacaaacgcggttgagttttggggaagggctattgtcatttaaactataaatgtctcccaaagttagcttggcataagcccaggaataattaagagcagcttgaaggctaaaggcaagagaggagttggctagattagatccctttcacttccatcattttctcaccgttataatttttgcaaagaccatttcaagaagtcccaggtcaaaaggacacatctggtgagggccttcttgctggtgggaactctctacagggtcccaatggcctggggcatcacatggcaggagggctgtgtatgctaacttgctagctcaggtctctcttcttatcaagccaccagtgccattcccatgataatgcattaatccattaactcattaatccattagggcagaactttcatgatccaagtgcctcttaaaggcctcccctctcaatactgccacactgggggttaaattttggaggggataaatagtgaaaccatagcaaccactgaatcaaaggagttaaatgctatttttaaaaatgatgctaaaagacaaaaaaaaaaaatatagtgttaaaagaaaaacttgagccaaattaaagttaaaggagtttaattgagcaatgaacgatttgcgaatcaggcagccctcagaattacagcagattcagagagactccaggggtgccttgtggtcagaataaatttatagacaaaaaaaagtaaagtgacatgtagaaatcggaagtgagatgcagaaacagctggattggttacagctcgctgtttgccttatttgaacacagtttgaacaatcagcagtgtataactggctgaagaatggcggctgggattggccaagactgagtgattgtcacaggcccatactcctaagttagtttttcaatcttgtctacctattgagataggttgtagttcatccacagggactcaaatatagaagtacggagtccttctcaggccgtatttagtttgctttaacaatagactttatgggaaaatggtattttgttaaatgcaaaataataagttagagaaacactttagtgtttataatttttaatattgactgttagccttagctgtttatttatttatttatttatttatttatttatttatttatttgagacagagttttgctctcgttgtccaggatggagtgcggtgatgcgatctcggctcactgcaacctccgcctgccaggttcaagtgattctcctgcctcagcctctcgagtagctaggattacgggcacccgccaccaagcccggctaattttttgtgtttttagtagagacggggtttcaccacattggccaggctggtctcgaactcctgacctcaggtgacccacccacctcagcctcccaaagtgctgggattacaggcatgagccaccacgcccacctgccttagctgtttaatatgtaactcatggcttggtatagttcctgagatttggagaggcaaactgaggtttgaatcctgtcttcaaacttattggcagttgggcctgatcaagttgcttaacatttttgtgactcattctccttacatacaaagtggagaaattttgcctatttttaaatagaattgtacaggacagagaaaaatgtattttaagcctcttagtgctttgtgatatatagcaggcaatatttaaatggtaactattattattgataatagtaagtatgtatttatgtgcttcacagttttacaattaaacatgtccctctcagggtttcttactatattcttacctagagctgtgacatattaaaccaccttgcaccaaaactgaacaattggtatactgaggataaacattacttttttattcagtagatatcactggataattttgttataaatctctgacagtaaagtgaaagattatgtatatcagttaaaactgataaataacattaaaaagaaatttctgaattgaacatcttttgctctaaattttctggccaaatagggatacctcaaaggaaaatggccggtgaatttgtatacagataattaaatagtagttttagtcagtaaatcaggaggtccaaataataagtagaaccagggacatagcatgatggaaattatgctgcccagttttcaaaaacattgatggtaataaacagctgtgtaacataaaagctggtatgagaacttggtcaaattctttttacctgagttgagaaaaggtatcatctccccatattctactccaaactgatgaaatgctcaccgagctgctccgtagcctggctggttacctcactgaaatttcacccttggaggccttatgaccttttaacttattccacagctagattccaccattatccaaatcaatggtgcatttacaggtgattcagaagttatttagagaagattctgacatgttcaataaaaattccaaatttctcaggaattacttttagacatctctaaatgaataacagagaggttatgtgaaatccttgtgtaattatctgtgcccagatttttttgtcgttgtttgtttttggtttttgaaacagagtttcactcttatcgcccaggctggagtgcagtggtgcgatcgtggctcactgcaacctccatctcccaggttcaaatgattctcctacctcagcctcccgagtagctaggattacaggtgcctgcgaccacacctggctaatttttgtatttttagtagagaaggggtttcactatgctgaccaggctagtcttaaactcctgacctcaggtgatccgcctgccttggcctcccaaagtgctgggattacaggcgtgagccaccgcgctgggcctgtgaccagatttcttaaccatcacatgcctttggacttgccattcaatgttccatttagtagattttgatacattgaaaaatcactatgaacacattttcaagtctagctggcttcatttttgtcctctaaatggcactaaatagaatctgtgattgtgacagtgcctttgctttaatctaccagctatttttgaaagatatataacttaattgaaaaatagtacaatcttttcacttagaatctttacgaaaaatgtaaaagatgctttgccagtctgaatagttaattgagtttgactgtaccgggtaagatgcaaaagagtgtgtctatggcaactctttatctcataaaaaatttaaagggcctttatttaatgtgactccttttaaaattcatttaatggcgtaagtaaaactggatatataattagagtctaagataaaagcataataattgaaataagataatatgaagaagctcacacaacaatgattgggcttcaaatgaatatattctttaagctcagctgaactcttgtaagttgtattttttcactatgatgtaataataatggtatgtggatgacaattatactactttataaatgtaaggtgtcttatagtgtactaggatctttcctatgcattatcaaatctgaatctccaattagccctggatatttgtatatccttttttttttttttttttttaatcaggacagagtctcactctgttgcccaggctggagtgaagtggcgtgatctcagctcactgcaaccactgcctcccagatagctgggactacaggcatgtgccaccacacttggctaatttttgtatttttagtggaaacggggtttcaccatgttggccaggcttgttttgaactcctggcctcaagtcatctgccacctcggcctcccaaagtgctgggattacaggtgtgagccaccaagtccggcctgtatgtccattttttagaaaaggaaactgagcacaaagaggttgagtaacttgttcaagatcacataattagtaagtgataaagtcacactcaaacccaggtattctaacttcaagtataatgttcttttctctgtgttccttctttgtataatagagagcaatgagtatgtaggaagggcagaatagctgcacagatctttacaatatgtctcacaataatgctgtgctttcaaaagacttgatttaatcattttgtttcctcattcactggtctattcattcaggctaagggggcccttttttctagatagatttgctttcaccatttcattcccttgtcaatattcgccatcttagaataattgtgttttcattctcccgcttgaaaaaagatgcttaggtaattctttatttaagaagtaaagaaacattatcaatattgatatagatatgaacatatatatatatatatatatatatatatatatatatagagagagagagagagagagagagagagagagagatggatagatacagatatagatacctcaaatccaggaagaaggaactagattttttaattatacaaaaataaaatactcttttttaatttttttcttttaccttttgtgttctttacataagatcaaatgaataaatacatttatttaataaggaagcttattggtagttcctgtagtatttactgtctattaagcatcaacctaggaattgtaccataacttttgtttaaatacaattcttctattgatgcagtaagagctgtcagtcatagtgctgggaatgccagaggggaagtcatccctgacaacattttttattgcactattaatacgtacaagttgacgttcaagtgtgtgtatgtatgtgtgcgtgtacataggcacacagaaacatcatatatacatgtgactacgtaaaaaaatacacttaaacatatctgtttactctgtaagtgaataatcatttatttcaatgtttagatgagattttaacatattagaatggcttcatttttctttctaggcaatctgctagcaggctttttccagcaacctattcttcccccatctttttgatattataccaagatttctgcctccatttttgttgatgtaattatcccggcataattttgaaaaaagatttcctggcaatgtaaatccacaagattgttgatatggcttgagctcaaatgatgcttctatccgatttgtttacctttcagcttgagcagagttcttgtttcataagaaaaacaggaagagatactatagtagagaaggacttttatggatggttttattttaagtaaatattgcctgtaagggatccaggaattttagtgtttttcttggattccttaaccataatacttagcccagagcaaaactttctctcaaatgatggtaaaaaatctaattctattaaatcctgattattctgtgagctaccttggaatacattgcctatgagtttttctgctaagaaatggacttcgtttattgctcattttcccaaaatcaaggaatgctgttgttcttcaatttagatagatgttgacaaggtcctcttcatagcagcaggtgttaggctataattgctcattatagaattatgttttgcttgaaggaactcaggaaacaagaaaagcatgttttctgtgtatatgaattctggttgaaaaattgaaagaatgacactaggaatagtatgtaaattggcagaatttgtcatttcattgtgcaactagtattttaaaaggcaataaatcaacgtgaacatccttgggaaatcagtctccttcttaggcctaacttgcaaagtacccccttaccattgtatttttttaagatagaaattgagattagagcaacacggggagcaaaatattggcagatgaacttgttgaaggagatgaaaaacaagaagctatagaaatagattggccaatagtgctgagcaactactcaactgcaaaaatggcttgcttttccaagcaatgtgtaaagcaattagcaccaacgtttttattagtttacataaaataatattactttgtaaacacctataaacagagattacctagatagcctaagactattattaagtacaataaaacgttactggtttaaagtaataggtatagaactttgtattgtatggtgcacattcacataactagagaggaaatggaggtctacaagtcaaggttgaattacacacttgtaatccatccttaagggaaaaagcttcactgatcaagatggtactttgcacaaccttgccaattgtttcacaaagctgtaatgatgccacaaataatctttcacctcccatacctaagtaaaccatatttgagttattttctctgctccttcctatacctttcctctttggcatcacaaagtcagatttttaacctacaggttgacataagccaaaaatgttggaagattataaactgcctctctttctctcactgtatgtgttgtgtatatgtgtgtgtacacatatataagcacacacatagatagaactcacacggaaacataagcacatatctacgcactgttgttttgctaccatatccagtgataacgtttattttgaattacatgtattttttttctgaatttaagagtgaaatgaaatagagttttgttagatatacagttattacctatataaaaatgattctgtgcatacttccttggcaaagtacaatacctcctccgctgtcactgccaatgcacaggtgttctttctcctggctgttagactcactgggagaacttagaaaaatatttcagccacagctttactctagcctagatcaattaatcactaccttggccttacaatctactaggcagtccttcccaaactctagaatacagcagaatcccctagaatgcttattaaaaatgcagattctaaagccccattctaaatgatattcttctggtaggtctttacaagtcatgtattcctggggtctttctttgagaaacacaactctaaaaggtctttgttattcccattctgggttttgaattctttctcgaaattgtaacaaaatatatgtactgaaatactgttcctctaacaatctgaagaaattttcagcactagcagcacttgttggcactattgttgttattttgtttaatatttaagacaactaaaagttacagtaatttataatgagaatcagtattatggaatcaaccattaacagttcatctcactaaagaatttttatttttattatttatttatttacttacttatttttgagacagagtctggctctgtcgcccaggctggagtgcagtggtgtgatctcggctcactgcaacctccacctctcgggttcaagcgattctcttgcctcagcttcccaagtagctgggattacagctgcccgtcaccacacccggataatttttttttgtatttttagtagagatgggatttcaccatgttggccaggctagtctggaactcctgatctcaggtgatccacccgccttggcctcccaaagtgctgggattacaggcgtgagccaccgctcctggcctcgctaaagaattaacatcatatgttcactagtactgaggttagttcccaaacactgcactaaaaaaatgaatgaaacaaatgaatgaaaatgtgtttccttagccatattctaagaaaatcacctctttgattattgtaattggaaccatctcttctttctttgcctggaatctttgtaacaaggttatcttctttcatgtcccattccaattagtaatcatttatttctattaaggcttttataatcattcggagaatccacactctttgtgtctgcagtcgctgagttcactcattaaatacagaattttcaacaaccctatttccatcttcattgttattaatacttcaaatttgcttctgttcagaaccacgcacttgtaggatcgagtaggtatacgtgttatccgtacacactctgaaaaactccctgcagacacttactgaacaggaattgcttatttaactgtgttttctgtctctttcatacatgttctctctctactgaagtgattgaaggatgacaaaggtccttatgggtgtttgatggcctgtgaatagctgtcggtctacgaattccctgaaaataatttctccacttgtatgaaaataatttactccgtgacttttcatgttgtattgtcaatcttccttctggttgtatcaggcaggagtcattgttttacatttcattctttagggggcctatgcttggatttctcccattgagaaaaaacaaagcataactctgacataatcgttggtgttaatatcatgaaaacctggaaaaactaaaggcaaggcaaaaaatatgcattcttatgcatgctttatgtgcactatgcccgtacataaacctggcagaactttaggcagaattaaaggtttaaatgggcatcatctatcctctataggccttttagtgtgcttcttatgtcctgaggaccataagaagatctaggagctgagtcctacctaccccacattgctggtaccgttgggggctctatgccattctactccagccagcttcctaagattagtctattacttttgtttcctttttttcttttctttttccttccttccttcctttttttttttttttttgacagagtctcactgttttgtccaggctggagtgcagtggtgtgatctcgtctcactgcaacctctgcctcccaggttcaagcgattctcatgcctcaccctcctgagtagctgggattacaggcgcgcaccaccaggcctggctaatttttattttagtagagacgcggtttcatcacattggccaggttggttttgaactcctgacctcaagtgatctgcccgcctcggcctcccaaagtgctaggattataggcatgagccactgcacctggccttattactctcgtttcctagacattattccacccttcctaatacttagctacctacttttgcttccgtttaaccctctgtaacttgttttaaggtggttttttttttttttaaatcctttggctatgtatgttcttataaagcaaaatttagttgtgtcaattcatgaaatcatattagcattcacttagaggagagtgagaaatgtttcctgctcatctatatagcattgcccatttgcacttagttttgatatttgaggcaaatccttcggttttattgtctaaacacacagttgtaattctaaggaattttacaccaggtcgaaggaggtagcattgcccttgcatactattatgtagggcattgtaatatgacatctgtcatatagtgagatgaggatggctacctctttcacttaaaatagctctggccctttatataaccaaagaaaatataactgaaatgcttggcaagaagtaaagttatgaacaatgggcttccagcatttgctgtatgcctgctggcataggaattccaagcatataatgggtgttctttatataatgaaaagccaattgtgagaccggcttataatctttggtgccagtaggcagcatgtacatttcataatttcatcctaatgttttaagtgatacaaaaatgtcctttttatctactaaagtgcttcacatgttaataaatacatgtaaatttctgtaaagtgatattgtcccttaatgaatcaaactgataattgtttctatctcattaaaagtaatctatatttgaaagtgaagaactctacaaataaaaatatttaacatatcaaacatttgaaatttctaggtattgtaagcacaaatatttatggtcatatttggccagaatgttttccttgtaaatagacttggaatttttatatccactattgtgattggctgtaataatttttcaagtactgtatacacaaaattataattacattttatactaactatgggtgggggctgtcaagtgtaggtaaacaccaatttgcctcatcatctcttttgtaaaacctccaaccaccaaacctaatcgagcaagtttatgcctcctctactgcatgttagcactttttccatgttaatgtaatatttgtacacaaacctgtatcatccaacagagcttctgagaagtagagacctttgcttattagactttcagttcttacttcgtagaatggtggttggccattccatacattttattttattttattttattattatttttttctgagatgaagtctctctctgaccccgaggctgaagtgcagtggcgcgatcttggctcactgcaacctccgcctctgaagttcaagcaattctcccacctcagtctcccaagtagctgggactacaggcacttgccaccatgcccggctaatttttgtgtttttagtagagatggggttttgccatgttggccagactggtcttgaactcctgacttcaggtgatccacccacctcagcctcccaaagtgttgggattacaggcatgagccaccgcgtctggccatcaatgcattttaaataaatgaactaaataatgaatatcatttaagtgcaattctgtttacatttgtttacatctatacttattttaatcaagtatattcggtggtgtcaacaatctgtagcttaacaattttaattgaaagactctaattacatatcactatataatagttaaatagttttcttggatgaaacaaaagagagtgagatagagaaagaagtaacaattaaaggatttcattatgtgatagtcttcctgtgtttttttttccttttagaaagttgccgcaataatagaaaatgtttatttctttttcttactagtagaggtggcatttttgctatagagtgagtgcccttagttcttcatttattaacaaatatttcattctatgtataaaaagtataataaaatcatatagacaatgttacatgaaaaatgaacggattgttattacaccaggaaatcactactgtgccctatcaaaatgagtttgaagtatatatgtgcatatatatgtatatatgggcatgaatctaaggcaatcaattatgtctattttcaatgctctgtgaagaaagaaattggttgcctactgtcacattttatcttagtgatactctttcattaaaatgcacacacgaaaaaattaaaaatgtaaaatctgattttctaagtggacttaggaaggtacagggaacaagtgctagtgcgtgaagtggaaagtatgagagtacatgaagttgaaaatgtgtttgtgtgtgtgtgtattgtagcaggtcatctaggactgcaattttcaaccatatgcccaagccccggcatagagatagtgattcagttggtctggggtggggtatgggcttaggtaatattttatggctctctaggtggttctgatgtgtagtaggggcaaagaactgcctctatgggtgtctaggactgtactgtaactatcagcaattagtgagagggttctttgtaatgcctttgattattcttctagagacatatgttctgtacatcagccggggagcaaaaccagggaattccagaagtggttctcccttaagacttactctgacggtgttagtgttttcataactcgagccttaccctcattctaggaaaaattataattattatctatcttactttccaccctcagtacttaacattttaagggatttagtgaatttttccacttccctttttatatttgttgcaggtaagtcctgttgaatatcatcctcaaatacatgcatattttactgccatggtaacattttctactttttcttctatttttttcatatgtaaattatcattgaaaatttggcagagtctctggtaaccaaagtaatcttgtctgtttctgtgctactagttttattataatttgattcctgttccaaaaatgaagtacagtaataataattttttaaaactcaaattatttgtaggtcaatattaatgactttttattaatgtatatgtatataggtttaacaataagtgaagcagcttataacagtatatattctattaagtagaaatttacacataaagttagaagaactccatgtgcagtgtcctcttatgctcatatataactttctgtttcaaataagagtttcaaaactagagtctgtgtggcacagatggtgaattgatgccataatttccaatctgcttgttagtagagatatgtcatatgtttattgatgattgcaagtatgtttggtgcattaaagcttcatatttagtattataaaaaacttaatgtcatgtggggaaagaagttgctacctttctaaaaattgtagaatagccaggctcaatggcgcacgcctgttatcccagcactttgggaggccgaggcgggtggatcaccggaggccaggagttcaagaccagcctggccaacgtggtgaaaccccatctctactaaaaatacaaaaaccagccaggcgtagtggcgcacgcctgtgatcccagctactcgggaggctgaggcaggagaattgcttgaactcgggaggtggaggttgcagtgagccaagatcacaccactgcactccagcctgggcaacagaacgagactccatctttcaaaaataaatagataaataaataaaaacaaaaattgtagaataaactccttgaattccaggaagaaacaaatattgttgtccagttatgcaattatgcataatgagagttaaatgcacaaagtgatcttaaatgtacatattcaaaaatagaggttggatcaagaattcagattattcaatatcaattcaattccttctgttgtgccatttgaatcctattgccaaagatgattattcatcttgaaaaacagactcccaaattcagagttcctgcattttaatttgcccttatgaaaggaaggattctttccttttctggaatacaatcaacttctgctgagaagaaggaaagtctttattcaatactgaaaatgtgtattttcttaccgtctatttatatggacaataatcaaacttttaattatcttctcacaatacttacagatctatgagaagagttgctatctaaagctggatctttatggagaagagacatgctcaagtgtagcgaataatttttgttacatatcagtattaactaagctttgcaaagtgaatagggaaacttatatttaaaatgtcagggaaaaaaagagttttaagtaaaagggacacctggaactctaaagagactatagctctaaacctgtagctgaattctgccttagatttcgttgacccttaactaggggcaaatgcacaccccattctcagggtttcccacacacctctggaaggaacacaggagcgtatttacagctatcgtctaaccattatagaattcctggggacaaagttgtgtcagccacctttgatttgtagtaaacaggtacaaaaccgcatcatggaattatttctgcttatataatcctcttctgcagtgtctgaatcttggcacctcctctccttcctcctaaccactgcaaaaacaacacccagattaaggcatcggggagaactgaatatctgaatatcaagtactccatatatattgatccatcgaatatgcctacaatatcactactaacctacaagtgtaccaggagttacacctgcagtataacagattaaaacagccttctccaaagctcatcactttgaatgttaaaagattcattttccaccacttaaaatctgcatactatgatctgtgtataaaaagctaaaagatatatccaatttcaaatgtaatgtcatgcaagtgtctactgaatgtgtatatatctttgtaagtgtccctgagcaaaataactttcaacttaacattctttttctcttggatataaaagagaataacgtaacaagagcaaatttgcttttaaatttctgccttgatagcaagttaaagtatttagaaccaacatcctcttaaatgtataatttatataacggatgagtctagaacagcatttccaaatggaaattgtaaagaacattgatcccgtaagatgttgaatgaaaaacaaattgttaaaatgtgataatttcatttccttctttagcgagtcacaactcaaccctgaaatgttttgtagttaaaaaaattgtttaacttagtttaacccaatgtttctgaacctacgtcacaaaggaaatgtttttgtcaagtgatacataactttcaaagagattggatttttttttttttttttttgaaatgaagtttcactcttattgcccaggctggaatgcagtggcatgatcttggctcactgcaacctctgcctcccaggttcaagcgattctcctgcttcagcctcccggttagctgggattacaagtgcatgccaccacgcccggctaattttttttgtatttttagtagagaaaggggtttcactatgttggtcaggctggtctcgaactctagacctcaggtgatccacctgcctctgcctcctaaagtgcagcgattacaggcgtgagccaccacgcctggtcgagactggaattttttgaaacacattttcataaatgaattactggggtactctctgtttattaactatgttagtactgacaaagattatttgctcggccaaaatttattcaggcttcccaaccttctcatagcccagtctgtgcacattctcctaaaatttagttttagcaggccagatcagtttagccagaaaacactcatccttggtatttgattatcctggatatctgatcatgttcctcatcatccaccatcctccaggggatgactggactattttcagcaggagtctcccttacccatgatgcttcctcttaataattttccatccactgacccctaccctgttccttggttataaaattcccatttgcctgtgctgtattcaaattgagctcaatctctctcccctactgcaagaccctattttcacggtccctatacctattgagatggtcttgaataaagcctgccttaccgtgattcagcaagtgacattgaataattttttctttaacagtataaggatcgcacattaccatttgttttgaaagatggtataaaaagactaactgaaaactaatcttggctgggtatcactggcagaaattcttggtcttcaatctatgtagaacagatatttgcattttcttttgaaaatttaatacattgattaaattgtcattttgttataaaaatatgaaatgaagggtacatatgatttttaaaaatttctgtccaccatcaccaaccactatgtgaaaatacacctttgtaagactttttctattctataacataccttcaaaaccaagaagaagtatttgtaggaaattcattgcttttatttgtgaattgataaagggaaaataataagctagggctcgagcttcagaacagggtgatggttttatatctctctcaaaagtactgcaaggtaggttgtttcaatactattaacaaccccagggttccctgacatcttctattcccagcttccattctcaaaaattatatcgaggccatgagttggactcctcagccctagcaaaagattattcatttgctctgtaacccttcttgaaccccttttcctggtagctgtgcccaataaatccgacttatatatctttgggagttggagagagagagagagagagagaaagaaagtgagacagagagagatagagggaaattattttagctaagaaaatttacagtcacaataatatgagagtctctgaataagggataaaagaatattagacgagacatagtctctgccaatggtgattaagtaaacatagtcaaggagaatatggctgtgaccattagtgtgtaagtggttacatctggtgggcaatctccagtcataagtaaaataatctacgagtgagatacaggctaagcaaagatttcataattaggaccgaacaagcactaagtacaaagtcaaacactgataaattgagcttcattaaaactaagaattctatctattataatacactaataacagtgaaaagaaaagtcatggactgggagaaaaatattcacaagacgtatatctgattagaaaacttgtatccataatatataataaactcatacatatcaataaaaagacaacccattttttaaaagttggcaaaatatttgaacaggcacttcataaaagaggacaaagatggtaaaaaacatttgaataggtgcctaacttcattagtaatcaaagaattttgaatacccctatatatgcatccgaatggttaaaatataataagacaatatcaagtattggggagaattggtgcctcagctggagctctcaaatattgctggtttaagtgtaaattaatatttgccaatatctactaaatctaaatttatgccttccttatgagccagcaattcctctcatatgtatgtgttcaaaagaaattagtaggccaggtgtagtggatcatgcctgtaatcccagcactttgggaggccaaagtgggagggtcacttgaagccaggagttttagactatcctgggcaacatagtttgacctcatctctacaaaaaaaaaaaataaaataataataatcaaaattagcctgacatggtggcatgcacctgtagtcccagctactccagaggctgagatgagagaatggcttgagcccaggaagttgaggctgcagggagccgtgattgcaccactacactcctgcctgggacagagtcagaccctgtctcaaaaaaggggagaaattaagtccaccaaaatagcatgcacaaggtagttaatagcaacattttgcataatagcagaacctgatataacttgtgtccctcagaattagaattaaaaatgcggtatagactgggcgaggtggctcacgcctgtaatcctagcactttgggaggcccaggagggcggatcacttgagatcaggagtcagagaccagcctggtcaacatagtgaaaccctgtctctactaaaaatacaaaaaattagccgtgtgtggtggcaggcgcctgtaatcccagctactcaggaggctaaggcaggagaatcgcttgaacccaggaggcagaggttgtagtgagctgagatcatgccactgcacttcagcctgggtgacagagcgagactttgtctcaaaaacaaaaacaaaaaacaaacaaaaaacaaaaattgggtatatccgtggaatattatatagtaataaaaacctgctacttggaagaatatgaacgaacttcataaacacaatgttgactagaagatgaacatttactgtgtgattccatctatatgaagtttgagaactggccaaagttatctataatgattcaggtcagcagagcagtttcttcctgagaggctggtgggaatatagtgtgaattgggaaagagcatgaaggagacttacagggtgctgcaattgttcagaactctttttccttgatacttgcttacagaaatgtgcagaatttttatttcacctagttttctatgcatgcgtagaatctccatagaacacacattttattaagtacgcattcaacttcttctaaaatacctctagtcatagaaaatgtaactttatttctttattccttactttgcctagcccaagctcctacaaaaaaaaagattagttaccatttaattcaaattataaaacagaaccagtcttttaaacagtatcggatacacaagtatctaatctaacttccattgcctatcagtggatgtggctttaatcaagtcttttctaaacaagatggacaggcactgaagaaaaaaaaagtgagccattttatgtgttttaaaatgataatgtgattttgaattttgctattgtagaagctcctaacaatattatctggcatttgttctatctgaataaagccatggcttatattatgtatatatggaatttcccagaatactattgttagacacatcactgagctgtgaaaaaaaaaatcatctctaatttgatcaatatgtacttacacgtatatcattagttgccattgctctcagcctttagtacattttttatgagccccgtgggccatgagcttgctttttcataacagagaacgagaaagaagaaatctcatcagtataataatacccacatcagtagagggcatggttcagaggcaatcttgttgtctgtcacagactccatgatataagctagaaatgataaagagattcgttacaggatactgtaaaagggatattatggtatataaactcattaagtgttaactagatcaaagcaaatatggcagaaaagagtctctgaatactgtagcagagtttattgaatgaatgaacgaacgaatgaatgaatgaatttataaaaagcgcaggggggccggggcgcggtggctcacacctgtaatcccagcactttgggaggctgaggcagacggatcatctgaggtcaggagttagagaccagcctggcaaacatggtaaaaccccgtctctactaaaaatacaaaaaattagccgggcatggtggcgcatgcctgtagtcccagctacttgggaggctgaggcaggagaatcgcttgaaccctggagacagtggttgcagtgagccgagatcgtgccactacactccagcctgggcaaagagagcaaaactccgtctcgaaaagaaaagaaaaaagaaaagaaaaagaaaaaaaaaagagcgcaggggtcagataattgagttagaaggtagaggagtggggatgttaatgcccatgtgagaaaagaggaagaggtattgaaggaatccagcggactttgatgaggaccatgcgggactttctattttcaggaacctaagggaacatcttgctgtaggcagcctggggctgtctccatcaaagaaatgctaatatttacattcattggtttttgttatgtgactgtctatgtgctaaagctgtggttctcaaagtatgtttcagacccgcaatatcacctggaaatttgtaagaaatgtaaattctcgggctgtgcggagacctactagataatgaattctgggagaggtattataagaagttcttcaggggattttgatatagtctctaggttgagagacagtgtagtagacaatacattcattactttatttattcttctccatgattctataaaagagctattgttactgctttgtttacaaatgagaaaactgaggctttgaaagaggctcagtattttgttcaaggtcatatagctggtatccagagatactgggaatagaacccaaatttgtcagactataaaacacggtgctttcagccactcctccagagccagggggataaaaattcattaatttccatgagtatttgtaatagtagcccgcaagtcctggaatacaattataactgctacagcattacctttgaggagaaaatatctcatttccccaattgattgccaaaataaaatgcttaaaatacaaatgtctggttgaagaaaccctttaattttttttcttgcgttcaggcatttgtgtcaggtttaactaatttattttaacttgcaatacagtgttgcctgtagtaacaaataggacattctgctattagtttttaatctcctaccgacttgttattttccactcctgaagctaaacttctttaacaatttctatgctcattgtatctacttccttactcacgtagctacctcaaacaccaataatccggctgcttccacatccttcaactgaaattgattttgtcacggcccaagtcacatcaggcctcatcttaccactctgtagtattgattgttgatcggtccttcctattggaaaaactcttcttccctggcttctaagatattccactattctagttttcctgtctcagggcaactttatcattttcttggagggttgctctcctatcgtaaatctcttttaacgttgagcttcaatcttaatgctcaatcaacatatttttcttgatctcatcaaaatccatagcaataacaactcttaaccatgaccctcagatttttatatccaaccaaaatcattcttttgagctagagacctatccccctgcccatcagttatgctcatgtatgtcacatagttaattcaaaatcagtatatatgagatcaaaaactgccttctaagcaattcttcctccttctctagctcattgaaagacatcatgtgccaaacttctcaggtttgggggtatcattcttgcattctccctcgagatcactgttctaacattaccttggcatcagccatcatgttttgccaggattgttgcagttcccctaaaacagatgttcaatttcccccacccctgtgattcagttttccacatgcagccagaatgttttaaaaagcatattcgattgtgtcatcttccccctagaaaaccttctgcggtttcttcaaaataaatttaactgaataactagttgacttaattcaatgttttccttcgtcacactaattaatcagtattttcatggtcctcgatgctgagggcttaacattcaagaataaatttgtcttatgtttactttaacttataaacttcctttaaatgaaaactaattgttaaatgatttgcaaaataaccagaggcacaaagtctattgtgatcagtggatatgacagaatatattttttgttgttataccatcactttcacaaaactatggaatatatatataggcatataggtgtgtatgtatatatatgtatagatatgtgtatagagacataatttatagaaacattcgtaataaacccctgccaaacatattttgcacgtttgaaatattagttgattggatttgtggtttgtatgtaagttgaacaattaactgatgtgatcattctgtttccatggctgttaccttagtttataccaccttttcacctgagtgattacaatagcctcctgattccttgtctctttatttgccacgttcccttcttcaaacttcccaaatccactttcccaattgttatcaaaaagagttttcctaaaatgtaagtcagataatgctactcattatgccaaattctcattgccccaaaagtgaaatctgaattctataagatgctctaccaatctctccattaattggcctctgcactatctctttacattcaccccttcccacccaccgaacccacccatccctcaagaacgacattgtacgtactaatcatgtcatacaagtcactattctagcttctgttattcttctggaaatgtcatctcccacctcaactttttacccagctaactccagtttatcatttaggtgatgtctcctttttggaacatacctagaattgacgttacaggaggaatatctcttgtgtgtcatctcaacatcccacagtaactatttttttttctttttgttttctttctttcttttctttttttgagatggagtcttgctctgtcacccaggctggagtgcagtggtgtgatctcggctcactgcaacctccgcctcccgagttcaagcgattcttctgtctcagcctcccgagtagctgggactacaggtgcgtgccaccatgcccggctaatttttgtatttttttagtagagacggagtttcaccatattggccaggctggtctcgaactcctgacctcgtgatccgcccgcctcagcctcccaaagttatgggattacaggcatgagccaccgcgcccggcccacagtaactatgttttaacatacatcaaaccactttgcaatttcctgtttacatgtcattatccctcattagtaagcttctaaaaagtatgggcatttatccagttccctatcatctccctagtccccagcacaatgcctgacacttaagtaattacgtgagtaattaaatgagtaattatgacacattcaagcttgttaaactctaaaacttggaaataaggcaaaagaacaagtagatgttcttttattatcatactaaaaagtattgtctaaaagatctaccgacagatagtttaatttgttagggacatgcgtctttgtataacttagtactaacttaaaagataatttttttgtgggtacatagtaggtgcatataatttggaagcacatgagatattttgatacagacatacaatgcatagttatcacatcagaataaatggggcatctattaccttaagcatttatcctttgtgttacaaacaatccagttatactcttagttatttaaaaatgtacaagtaagttattattgactatagtcaccctatagtatttactattgattagggcttagattctgagaaattttacataaatgtacacatttttgttcagtagagagacaagtaatatctttctggcaccctcaaaatatataattttattgcactttttgatgttaatctgttttgtttctaacttagcaatcttgttctagcttctttttctttctgtgactatgtgtgttcagtcccttgaattcccctttgaatcagttttaatttgttgcctgttttgttattagttagttgaataaatgtttccatattatcaggatatgtttataagggaacagcaaatttacttccgtgtgttttaaactatatgagaaacactgagcttggcatcaatagctaattctaggggagaaaaaaagtcattctcgtatatatttggaaaaacagtttttattcctttttgagatattaacagccatttgtatgttgaagattctgagaaacttggaggtgatttaatctgttttgctttgtttaatctaaaatttcaagattattttggttctaggaaattttgctctagaaaaaacagtttggaaacattggtttacttatagctttaaagaacaatattttaaactacaattcttgtgttcgaaatgctgtaaaaatcatttctattaagatttatttcctctaagtgttttgcattcaaataaggtgaaattctgggtctccaaatatacatttcagaaaagtctttgtttagctgtagggaaggcatcctgacttctcatcattatagtcacatagatacactagatttaaaggatatttaggtcgggcgcggtgactcacacttgtaatcccagcactttgggaggccgaggcgggcagatcacctgaggtcaggagttcgagactggcctggccaacatggtaaaaccccgtctctactaaaaatacaaaaattagctgggcgtggtggcacttgcctgtagtcccaacttcttgggaggctgaggcaggagagttgcttgaacccaggaagcggaggttgcagtgagttgagatcgtgccactgaacttccagcctggggaacagagccggtctccgtctcaaaaaaaaaaaaaaaaaaatagagcgtaattatatattttccttattttaaaagggaaaaaatactttccttattttccatatagagtatatcaaaataattacaatcattaagtaaaactaacatttacctgtggtctaaaaaagtcggttgaggccaggcgcaggggctcactcctgtaatcccagcacttcgggagttagaggccagtggatcacttgaagacaggagtttgagaccagcctagccaacgtgatgaaaccccttctctactaaaaatacaacaattagccaggcgtggtggtgggtgcctctaatcccagctacttaggaggctgaggcagaagaatcgcttggacccaggaggaggaggttgcagtgagccgagattgaaacactgcactccagcctgggcgatagagggagattcagtctcaaaaaaaaaaaaaaaaagaaaagtcagttgagatagtgaagatccaaagatatctgctaaaaaagtgtgtgttatctagttttaaaaagaaatgatatgcaaataaaaacattagtgagcagttaaatatttaaagggtacgttacttacattatgggtgtaaagtgtaagtggatttctgaaaacatgagcaccatgtgaacttcagtatttaaacaagtttattgcttttggcttttggatttattgtttttttgaaaatgggtctgagaacggcctagaagaatgggtagacttgacatctaagtctatctcaattctgctcttgagaaaagaggaagaaattgctcagaatgttctatcataattttcttcttgctctttagatttctaaatggctacacaggtattgagaaacacatttttatcttgttatgaacactaaaattcattagccttatatttcctctttccttatagctgtgtcttgtttttgatggcttaacacttttccattctaatcaagctttgtcatgggctatgggctgaagtgccttgtgatggactgatttactttcagtccctgtaatctgtgcccttgaaggctagaggttgaaatcattaaggctctgctgttgcccttgatctctgctcaaagaggctagagattgattggttgacagtggttgacctggacgtctcaaaatgaagccgtgatgaaggaaaatcaagtacacacgttcagaatatttcataatgacatttattctgcgtgcattttttccagcggtatttttgcttctttttttaaaaaaaatctagtttaatcatttctagcccaccctcaccactaccacatgtttattccatttctacattctggggcacttaagaccttttaattccttgaattagtcatttataaatgttgtctgaatattctatcaaagcaaggcagcatagagaacttattattacacacttatcacatgaaaaaattatttattagcaaatatctattcagagcaaacattttgatcaaagttggcctcaattcactaattagttattatgcaaacataacaaacatccaatagaataaatattcactcttttctacagttttttttggaatggtttcagtgctggaaaaaaaaactaaaccaattcatgtaagaaaaagtaaatgtctgttaagagaaaagaccacttttaaatacacgttttaatatttctattttaatttctacttaaaaaggttaaggaggaatattctaaagacgaatatatttgcaaatactgtgggaacactttattgaaccaatttgagaactaagtcaattatattgaatttacatatttggttaaagaaaaaatgagaagtgattagattagttcaatatttaagtgaacttaacagaagtatccaagttcatgttgaccctattgcttcgtattaatattgataattacaaatatacatatatattaattttcaaaaatatagattatgagtgggtaataatagcttctaaaaattcactttggtactattccatagtggccaagtttccttttgttctctggagggaggtggcctaatttaggcaagtttagtatttagagcaaaaaaaaaggcagtctatgcagagattcaatggcatcttaaacctgccccacctatctctcattttttacattgctttttcattatcttttcctttcctttcgagagacttgaatttaatattgtctctcttttccccatgtttgccttttataaatctaagcatttctgccattaatactgtaggttaagaaagtggcagccaccatatttaaggaatagtaaaatctgtaactggggaaatatacagtcttctgagaaactgaaataaatttcaggtaaaaagtatgtgacgtcaattgagtggtgcacgtcgagggatacaaacctaaatacattccaggatgaaaatcgtgataagtttggagctccattttcagggaagtttctgtactgactttagaaacattgcaaccaaacaaatccttgggaactgtagaaaggactctttttagtgttcaggctaagtagacaatgcctacatatttaaagtttcatttggcagacttgacacagtaggcttcatggaacacaagttatgccttccttggtctgagagagagaagactagttctgctcaactgaagttaagatctgaggttcagtgagtccatatagatatcatggaagattgagtgaatacactggccctaaagcaacagaaagagcacaagttgagatacagttttaatccccaatgattggaatcaccactgccagatatcacatcctaattacacattctgcccttcaagctctggcaatacttttcttgcggtgccccctttctttagtttgccatatgaagagtgtggtaattactttccctgcagttgtttaccagttctcattcatttttcaagttttcctttctctctctctccttttttttttttttttttttttttagatggggagtctcgctctgtcagccaggctggagtgcagtagcatgatctcggctcactgcaacctccacctcccgggttcaagcgattctcctgccctcagcctcccgaatagctaggactacaggtgcatgccaccatgcccagctaatttttcttgtatttttagtagagacgggatttcaccatgttgggcacgctggtcttgaactcctgacctcaggtgatccacccgcctcggcctcccaaagtgctgggattacaagtgtgagccaccgctcccagtcgaatttttctttctctaaacaattttcagtgtaaaggtctgctgtgctataaatttgtgacacatgattgtgttgtagttacgactacgtaaggctctatggacaggtttcctttagttctgccagcacagctaaccagctaatataaatataaagaaatgcaactgttgacaccaaatgcagtttccgtttgcctgaacaatcaacaaataaacacaaaatctgaataaacattacaatgtgaatctatgtgtctgtatccataattatataaaattgaattattctaaagaattctatgtttcttaacaaaaatattatatgcatatatacagttaggtttaatagatttgtataagcatttctaattcttagcttccattgatcttcagtgtttcagaatatttatttcaaatcacttttggaagaaagtaagtttacaaattgtgaaaataatacacaaatcagagatccctatttaaaactaatccctacatcgcttcatcaaaatgcctaaaattcttttttggaatgaaattcacagagaattgcaagattcatttcctttacacttttattcactgccaataacttggggatactaagagtgcaggagaagcaggtaattctgagggcgttttggaggaaagcagttttgcattggctaagtttttaaaaaagattaaacatttaagtgccttgttttaaagatttgaatgataatgatttcaggtaattgatttttaagctatatggtaataataagacaaaaataattcatttgtttccttttggaaaatagattttttaaaagataaagatctgttttaatttttgtttttatttctaaggtactgtccaacctaaaaatatgaaagtaggtgtgcataagcttttttaaaaaaaaatcgccagtagtacaaacaaattttatagtccatcatttgcagggctggagggcttgccatatttaaatgtgtgacctgttttgagtatttgggtcaaagagaagggaggcaccagtgtttaaagtggcacaaacagagggaagaatgaaaatacaatcgaatatattcatttttattttcataaataaaagaaagtttaaaaaatctaggtacatcagtaatgttcccttagatagtattattatgtggctattgtttactctcctttgtcagcaacacgatcagtgattttcagcacctgctattgggttaataatggagttagagaagcatgagtttcaatttgtgctcatctactgcaaagtagctatatgaacttgggcagttacttaacctcgctaagctttgtttcctatccatacaatagggtcaagagaagtacctctcttacaaggtctgtgaaaatgaagtatgttcatgtgtttaaagtgtttagtaggtggcacatagtaagcactcaaattatatggactatggccattaccttgacaaactatattctctctccatttcctcatatgtaatgtggattaacacgaagattaaacttaaaaagtgcataaaaatctcagtgtctagcaatttgtagatgttcaacattattaaaattccctcctcaattttgcttactttgctgtactgaatgctatgtgagataggaaaggatatcaattatttgctatgccccttccgggcactaaataaatacatgtttttgttcattcttttactcaatctaaaagttattgagcaccaaataggcatcaggaagtatatggacaagtataggaaacaggattgatatttacaatcaggagaacaattttgagcccccagtcagtcacttgatgttatcctgggcaatcaatggatagagtccaaccactctaagcctcagttttcttatttctacatgttgatagtattaatagttgttataagatttgaaacctgttatggactatagtattttgtgcagacattagtcaaaatcataaattattttggggagcacatttacattcctcacagtgaagccttgggccctacacctttgcactaaattatacatctgtagcaggaaaaaaaaatttcagtatcacacaaatttaagtgggctaaaaatggtattttattaatttttctatagctaaattaaatttctattttggttcctcttttaatttaacaggtttcttaatataccattctcaggaaatcttaataaaattcagtgacttttcaggtctaccggtcacattcaggagttgttaggactctagcctccactctaggattggaataacacaggagtattacttagcttcatggcatcagggccaacttctgattctaggtcaaggacacacagagatgtgacatccaatgtggtctgtggggaagaagatctttgcatgcaggcattggctgaagtgaaccagtacctgcatcccgcccttagttgaactgcctattctgcctccaggatttggggtgtctgtgtcctgattaccacacccttgaaagactgccagcttgctcctcctaacttccatgaccttctcaagcaccgacacatgttagctgcttatcacaaacctgatgagatgctcagacccctgtgaggctaatctacatgcccagtccctttgctctggttgggcactatttttcagcagctccagaacctccttctcttctttaggactttggttccctaagaggacattataatgttcctcttatttgaaaaggtgtgtgtgtgtgtgtcagagggtcaggaccctccccacacccccacacggcttctagctctcacttatctgtaactctctcaacttccccctcttcttctcttggtaggcacctagagcaggtaaaaacttttaaacaggattcttctatatctgtttatgccagaatcatggttcacttacactaaaagcagttgacctctgtcagtgaaatcaagagttgattttgtaattcaagagctctgtatttataaacaaccctaaggcagtgaggaaacagtgcctaacttaccttacttgcaaaggatggaacttaagaatgtggttacaatctcacgaaatacttgtgtgtgtgtgtgtgtgtgtgtgtacgcacctgtgtgtgtgtagttctgaagatggcattgttaggtggtggaggcctataatattatgattctcaacatgtgaattgttatcacaggcaactaatcctattgcctcaggtttacaatctgtaaatgggaaataaaatgcctaatgtttgttctcagcctagttgtgaggattaaatgcaaaatacagcctcaacaaatgtgagttcccttcctcacattcccttgtaaaaaaaggactttccccaccccccttttatttagcatatcaacaattactcctttatttgggactgaacagccttttactaactatccttttgtttctcattttttatattcatgcatagtacaacttatgaaatattttaccccaaatcctcttgggtctgctttatatgcataaccaaataaggcatatttttatacaactattgtgttttatcttaaggtaaatttcaagctaaagtgaaaaatgaattccttctggtattcaggcagaattttccttacgagaagtaggtcaagaaacattgaacgcagaataaatttatctctgaatacggctcttcagctctggattgtttaaggatggcctagaatctacgctgagcattctcttgcatctcctttttcagtatggttctgaattagcactcgggcataaagcatttccttggaattgctcttatttttgtccccatattctgcactccatcgtcaggtaagaaggcaatatgtagcagtcatttaagaaaccagcacataaattatttccgaagttaaatcaatgtgcatcttactggttcagttcacagttaactagaactgctggggcttgcttttatgaattgtcccattccctccttgctttctttttgagactgactcttgctctgtcacccaggctggagtacagtggtgcgatctcagctcactgcaacctcctcctcccgggttcaagtgattctcctgcctaagcctccctagtagctgggattacaggcatgcaccaccacgcccggctaatttttgtatttttagtagagacggggtttcaccacgttggccaggctggtcttgaactcctgacctcaagtgatccacctgcctcggcttcccaaagtactgggattacaggcatgagccactgcgcctgggctctctcttttaaacaatcataaatatgaaattaaatgggctgactggaagcaaattggtctgtaggaacgcccatgaaagtgttccattctgattgttttcccatcctgcagcccctctggcctagtggaagctcctttcgttttgcagatttagattaactggggtaggtgagagagggcagggatggcaggccatttgtctctcatcaccgactgaaaagttgagcctaatatataccttttgctcctctacccaaatgaattacaaaattctaattccctcacacaccggggcctgttgtggggtggggggaggggggagggatagcattaggagatatacctaatgttaaatgacgagttaatgggtgcagcacaccaacatggcacatgtatacatatgtaataaacctgcacgttgtgcacatgtaccctaaaacctaaagtataataataaaaaaaagagttgattgtttttataatctaaaagtaaagacagtttggttttgtcaaaacttctttgttttctatttattttctctatagcttctaaatttgtgttctgcttgtgcatgcgtgtatgcttgcatgcatatgtgtgtgtgttttccttaaagagtaggcaaaaaagggcagaaaatagatcattcccttataaacctgacaagtacctgtttgtttctttcactgtggtaactggaaggctggaaatactgagcacttcagtagtcattctaaaaagattggttcatgtttaatttgtttgactgcccaaacctctaatggttcagtgaaaccttcgtgaggattttaagaaatagatcaggtgatagtttcagttgaagctactaaaaaaagcctttttgttcatattattttattagagtgggaaattgggaattctaaaatgttcccacatttgtcacccgtgttactctggcagccttttgtcatgttcacattttccctgttcgtttgttactgctgctgaatgtactttaatgattctaataggagctatagattgtgcagaagaataacaagcttcaaattaaaaaagaatatatttgcattttgtggcttctaaatattaatacaattgaattgtttttgttgaccactgtacattgacttcccagggtccggtgcatagcaaattcatagatgctccataaaataattatagaaccatgcattcgtgtgtgctgtgttgtggttctgggtactaaggatgtctgcctgagtcctgaatgagtcttaatctccatccaagttgtgtgtttcagagttgggatggtgcaaggaatttgattattaatgtaaactttagataactcatagcatgaataacaactgtacagtagaagaaaaatgcagaaagaataaaaaacacaaacaacagctaaaacaacaacacataaaaaacctcaaataattagagcaacaggctgtgaatgcatttagcaaacatatacccttcacttacttttgggaatccagtaactttctcctctgagttcaatgaaaaatcagtagcacttacgggtgtgatcattaactttgtttacttttttagctttcaatgacattcacgtttgtgttgagatttgttttttctttcctgaacattttatcccattcgccaatccagaaatgatagaataggaaaagaacaactagggctttatgcaagtacagtaaaatctattgatgcccctctacaaaaggctgcaaattggaatggctgaaatcatctgctcgtcttttgtgttgcattttaggactatcaatgaaacttgaaatgatatattaatagaaagtttgaacaggaattatatattgaaaatgtgacagaatgggtagatccaatcatcctaggctgttgagaagggaatatgcctcacagtcttgtactttttagatgaagccttccaatttacctggcagcccacctcatggctcagtgtttagtcatatagcagaggttgttacaattacaaaagttctcttttttttccatggaaaattgatcatttggagcagtagattaatttatttcaattttaaagtatgagaggcatagaggtacattaaaaagaacaaagactttgtagtcagagacatctaagagttgtgtaaacctgagcacataagtagcattttcttatctatatgatgggatggggttggggtaagaatatatatcatataggcagttacaaatataaaccacacatcacgtatggattttttttttagatgaactcatttatttgacatattaaattagacaaagaaatatatatgtaaccagataaaaacaatcacattctcatactacttgaacacaccgcagtggtcaaaaataatggattgtaaaatggaccccaggatttaatgcaaaaaccaccccatacgagaaaagtttcaggcttctaacttcactgaatccagtactaaacgtgcttctttatattcctcagcttcttccaagtctttttcactttctaatatctgttgaagatccaaatatgcggcttccaacctgcgctggcaatctgggatcatcatccgggattcttgtaggatctctgcctgctttttgatgtcataattttcaccatcttcagctctcattttttcaatcttttcttcttgttgttttgcctctttttcatacatcactttttatttgaccaaccgcttcaccacaccggtcttgatcttgatctgtctcacgcgaggatcggccatggtccctcgagccccgcgagaaggaggggcggaaagccggggtaaccgtggagggcgacgcgcagaggcggtagctatttaggcttggtcgccggcgcgcatgcgcaggctgcgcggccacttaaggagtttttataataaatcattatagtgtcataccttccatcaaaggattgagtactcaggtgtgaacattggtaaacaatttttccaatattaacatctgtagtattttaaattatgtgtcattttaaggtactgttattctctttgtaatttaacattttttataatagaaataattttgcaattgctacattaacattttgagttgattattgcttattgttagcaattccattgcatcattttacagattccatcactgtgctgaaacatcccatctgtttgtgaaagttttggatgttttctttagtatctagatgaatctattccttatcttatcagtcagagatattttaaagtccttgtctgttagttcaagcatataggttatctcttagtctggttatgttgatggctttacttcttgataatgggtgtattttgcttagttttatttattttttgcaagtctcattttctttttagtgaatgttagatgtcatgtatagaagaaaaatagagaatgaggtaaatatgtttaatcttggaaataggtatagctttttttctgtcatactgctagtatggggtttgagtcagtggtgttagtattgagctggtttggaggggcgggggttgttgttgctgtagcaaccttcagaacactacagtcttcaaagacctccactgatgggctgctgctatcccgtgcttaatgtaatagtgtctgcggtcctaaagggatttctatcttcttgttccatcctcagttttcagcaagccttatatgcctgtctctcccctagtggtaacagatcattctgtttttattggtgcagaatcctgggccaaagaggttatcatactgctcttccaaagagggtatcttgaccctctctcagtggcttctaccttccccaacccctctgaacaggcgggtcccatgggtggtagagtttagtatctttccttcagtttagtatctttccttaaatcttacgccttttagaagaggagggtctggaaaatgggtttgacttcatgtttgtgtgtcactgaggggagcttcttcctatctcttgtcctacgccttacttttttgcaagttcccaatagaagtttgtggaaaagaattccagaatgagtgcagactccttcggtctgcatttccaaggatgctgaaatgtcataccagcccacacctgacttttaagaatgccttacaattggagctattttctttttcctgctcctacgatgactacttcttcctccagttccctgccaaaggtaaacctttcatgtatccagtctctccttggaggagattgaagtactttggctcacctcgttgccttgtggccacagctatataaatggctcaaaaaataatacgtttttatagatcaccctgctttttctcattgggtggagcaacgttcttatatagcatttttacatcctaagcagaagaggaacttgattatgatggaaagcgtaagtattttaccctcttgggatatccacattcgacatgttaatcattacagttacccttactttagatggaaacaatgaataatacttatttttattagagaaaggccgtagtagataagtgatattttaaaaattgaatttaataaaaatgtattgaggacctgttatctgtgaatcacccaatgggaaaagtcatgaaaagctgaagaaaacacttcattgtatttcagagcttttaatttaaaggtgaagaaaaaaggtgactcaaaagcattttgtatattcagaatccatttgtgaaacctaatttgtgatgttgaaactgagatttggcacactgtccaaaattgcattcaaaagtgtagaacctgctgtcctggcctttttgttttgtttgtttgtttggtggggtggggtggggtgggcgtaggaaggaaaaagaaaagataaggagtgtggtattgactgatagtttattctcaagtgcagtcaccagggagttcgaactgacttctacttttgaagttgaaacatggaagcagggctccaaaattttgtatctcattgaagtaacttagaatactcacacttttatgaatgattgagatacttcctaaaaatttaaaccatgatatctccaacaacggaaaagagggaatatgaaacccccataggctacgggtgtcaatcaaaatagtcttcggagaaatgaaatgttttcttcatttactataaaattgaagaaaaaatttcatttttcttttttttcttttttgagacgaagcctcgctctgtcacccaggctggagtgcagtgacgcgatcttggctcactgcaacttctgcctcctgggttcatgcgattctcctgcctgagacttgcgagtagctgggattacaggtgcatgccaccatgcccggctaatttttgtgttttttagtagagacggggtttcgccatgttggccaagctggtctcgaactcctgacctcaagtgattcacccacctcagctcctagagtgctgggattacagatgtgagtcaccgtgcccagccaaaaggttcatttctcaagttttacaaaacttttcagtcaaaattcacatatctactgtcacataattcatactcaattacattccttcaaaaatgctctcacacaaagtttgaacacatcgaggcaggtggtttgaaacatccatcccaaagttgagctgggagtcaaggtgacaagaatggcccatgagcagtgagatgtctaccaatgccgggctccggggcaaacaactaacattaagtgcaaaggattaaacttgttaattaggagaaaataaaagcaggcatttgcttattttattattgagtttatattaatagtaatcacttccattcatattagatgcaaaggaacttttaatattctatgcactgacttaaacttatttcttaatccctttcatctccttataatgatgcatatgagattattggaggtttggaggtatgcactaatgcaaagtgatgagctgtaaccaaaaagtaaccaagaaaataaaatcacaatttcatgcatgtatttatatttgtcttctatggcaaaccatggggatattgaaatatgaaatttcaaataccctctttattatgttagatgcattatttttaacaatagaagccttaaataaaatattaagatacatttgtattttgacacttaactgcccttggcattgtgcatttaaacttttggtgtctagcaaagttaaagggagactgtctttaaatacatatatattgatagtgccattttgttagacatgtcatctttcgaatgtaatgatattgttcacacattgattttattgatgatgttaaatcaaaatggtttctgcaattagtaacttctataaaacaaacatattaaaaggaaatcatacttcctattgtagtataccaatttatttttccatttaggaatagctatgctccctctcatgttttgttttgtataccttactaaattaaatattcattttattctttaccagtttccatcacagacacaatcagtattatttaaatttcagcaagaaactaaacaagacttacaagtttttcagtgctaatgatttttttttctcattaagtctgagtctaatgaaactaaacagaaagttctggttggattccttggtcacccctatctgtgtttgtgaattcctataattggcatgaattgaaagttcttgttatcactgatagtaacccagagacaattccaatttgggtttaaatggccctatgcagacaagggtaactgaacaaaccaaaacagcttcatgtgtttatggcagataaataccaattaagtactagaaatgacatcagggttttttttttttcctgtatagtttcaagttaagagactttttctcccttgagtttgcagatatagagcatcatgaccttacaagaggaaggagagcaacttcccatctgaatgagagatggaaaaattatatgaaatagaactaattctactgttaagcagtaaactacttattacttgagtattaattaggacacttggctacaaataacttataccaaatttgaactatctttatcaaatgtggaatttattccaaaggatacgtttattctaaggattaaaatgtttctcaaggcaggttagggcaaattgcagtacacctcagaaaatgcaatcaaaaccttccaggactctctgtcacatctccttctctctaaactatcttttttattgcagattggcttccgctgttcctcatgtagcagaccatgattgccaacattcccttatatttatatctcgcagttgaaggattcagggagagcctgattctaagacccaagtctaaattctttaaatacatacgtatgtatgtgtatatgtatatgtatgtatatatatatatacacacacatgcattcatgtttagatagacatacacagacatatatgtgaattacattgaattacatatgaattacatttctatttaatgtattcaatgtaggttacaatgcaacgttatagaccttttcatccattacaggtaggaatgtggtttaatatggaatttttgagaagtaatttgaaaatatgtaccaaaacttacggagatgatttttcacctaaatccattataatttttgagactcttttctaaggtaataatcccacatttgggtggaggctttatctatattgatagtaattgcaagactattttaatagcaaaaattatgagaccatttttcaaggttccaaaaaaaagcagaacggtaatttttatgggaacaaagaagacaatgcttctagatatttaaattgtgtttgaacaacattggaaaacctgttattttaaatgaagaaagtaaggtgtctaactacttgtgcaatgcaattacaattatgcaaggaaaatgcaaaggaaatatatcaaactttaaatcctaaagcttttaatactcactttttctctagtttctaaaatttggctaataaacataaatttaatttataaattaattgaccttggcattgtataaacatcagggtaaataatgcatctgtctctctgtctctctctcgctctctttattcaactttatcctaaagcatcatactaattacaatctattggttttagtttgactcctcagctaggttactcaaacaatgaaagactacttttaatctctgaagatgtttctttatcttgaattttgatttcctaatcaatgaatacttgtctaaatttagtattaagttcacacacatcttttctcttttttggattactttgccaatcaataatgttcctcttttagcggttactggttatttctactgatctctgctgagagtttattctcagacactttcataccacgctttgaaaatactggtttccaagctgtgaattcactgtatctatgcagaaaggagtgatttgtttcttgtatggcatgatgttttttatatcctgtgaaaaccatcaattccacatttgagtggttccttcatgacatgggctgctctaactaaagaaaaatgtgcattaaaaatatgtgtccgattaaggcattaaaatatcttaagcagtcaggtagcaaacaaatctttctgagttccaattactgtattacattatgtcaatacttactgtcaaagtacattacagaaaaaggctgggctcttttcagaaagggcattgcaatataatgggtgacaagaaactgcatctgtgtatatggaagcacaagaaactaacaacaacaaaaaaatagtgcccaatcctaggtggctgaagagtaatatctaagagaatatgaagaaaacccattatttattccctaggccagataaggagccctggctttctctggcatagctgcagtgtatataattatacctctttcagtgccaattactgtgtgtatatccataaaaagaatggtacaatggtgacagagatgaagagcagatctcttaaataaacatgtaaaaaaaagcaaagtaaagaaaaataataaaaacaggtctattgctgttaatgccactgttccagaaaaaagtaaaacagagatcattaatatccataagagccagaataatgtctatatttttcatccaacatttttcaaaccatggagcccttttagaatctgctgatgactgtggactctcatatatacacactcataaaattttgcccacaattttaggggtttattccatagtcgtattgaaagcccatagatttcaggataggaataacaatgttgattactcatttggggccagacactttctatgccatataaagataatggcttatttagtcctcacaacgacactatgagatagttattattttagtacctattttacagatgagaaaactaaaggaaagaaaagttatgtaaataaattgagaaaactcagccagtaagcggcaaaactggactttaaatccaggccgtatgattccagagcatactccaacaaggactgtaaactgcatcctgcagaaacaaataaacaaacaaaaacctagaataaagaagcagatgatagagttttagaactggcggaacacatagaaattatcttttccaaattctatgttttaaagttgaggaaattgtattccacataattaaatgattaacagaagcccatagagcaagttagtgttagagccagggttcaagtgggaacattcatccaaagctcatgacaaagctacaccgatattattatcattattctacaggtgaggaaacagaggcacactgttaataagtagcagaactacctttcgaacccagataggcaggttcaaagctaaaactaccatattactgtaattcaggaaagccattccctttataattcgtttagtaggcgctcggaatgatcaaatctttaaattagaaaattcgaatgtcttcaatttacaaactttggaaattctggagattctactttacaatcattttaatgttctctaatcaaaaactaatgttttcagtgtgctacaattcatgaattttatattcatatcagaatataaaattatacacatgcatatatgaactttatatgttatatatgtatgaagcttatgtatgtatataacaatatgtatatgaacacaacctgaatacatatgtatatatagataaccattcaaacattttaaattggctatagaggaaagcaatttgccatttgacttaaagtcttttgtaatgactagaatttaaaataaagtttacaatttatgaagatgaaataaaactatacttaaaatgctgtttttcgaaacagaaaattcccttaaaacctcaaaatctattgtttgttttatataataaaaatccaaattttttctacaatgtctaaatcttttgtaattctgttatattttcctctacaagttcaactcagtgatacctaagtgcaaacaataaggctagtatgagagctttttttttttgagacggagtctcgctctgtcgcccaggctggagtgcagtggcgcgatctcggctcactgcaagctccgcctcccgggttcagccattctcctgtctcagcctcccaagtagctgagactacaggtgcccgccaccacgcccggctagtttttttttttttttgtatttttagtagagacggggtttcaccgtgtttgccaggagggtctcgatctcctgaccttgtgatccgcccacctcggcctcccaaagtgccgggattacaggcgtgagccaccgcgcctggccaaaagttacttaatttgcatgccaacctacactcacatctattaaatgattagtcaatcaagatatagacaaaactcatctattggcaatgtacactgagggacgtgttctcggtgtagtcctgtcaccgatcttagtacagaaataaataccttttttaatccagtggcataataaacctgagaaaagagaagtctttcattaagaatcttggaagaagcagtcgttaaccacttgtcatcagtattagcaactcaagctgaataaaaattgattgtgtgactctggaccttctttgctctgccacttggataatctattagcattggcacctgattaactctcaaaactgtctcctcttttgattagctcccaggatttcttttgtattctcagtaataattttccaaacccttttctaaaagactgactctaatgttcttttactgactgcaaagtttcccgtcagtgctgaaaacatgtttggccttcattcctatttataatttttggcttgatctttcataaacactggcttaagacttccgtatttggtgaacagggagtgaatgattactccgaaactttatttctgttttaagtgctttcagtatttggcacaaggtggaaatgagcaggctcagtactgaccattgctattacaataactcactgcatttccttaaaacttattttccacttaaattgttttctacattgatttctgtctgtgctaatacttggccatgtatgagaacaacctgcttgttttaatgtttaaattttgaatggtatggtaaggagaaagaccaagatttaaaagataatatattctgaaagggcaatttttggaaagcttttaatacttcatttaaaacccattcttcagcttattttaaatttaatgatggaatacaaccctctcttttttaaatgaagaggttatatacattccatcattattgaattttattctatgggccacatttactatttacctgctatattagtcagctttattataggctaatgctctgtaaaaaacaaatccaaatctcaatgacttataagaacaaacatttatttcttattcacatgtcaggttcaattttgtattgagtacaggtcagctctatgcatctctccttttaggaacagaggctacctgaggcgtgtacttcccctgacaaagggaggaaggaccaagaaaagtgaaaacactttatgattcttaagcccctagctcagaattgacacactctcatatctgactgtgttccactggtcaaggcaagtcacatgaccaaggccacatcagtgagtgggatgtgtaatccacccatggtgaaccatggcaagtggaaaggaggaagaaaaagaaaccgatgagcaaataatgtaaactaccaacttgttcaagaagttctaatgcaattaaatatatagtcaggaataataatactgatctctattggcacttactttgtactaagtctttgcttaagactactttcgatgctttacaggatacctcatcaaagtgaagctaagagtttttttaccacgattatttcctcttttcagactggaaatcttgggtttggtgtggcttatgagtcttttctttctttgttttgtttgtttgtttgtttgtttttgagatggagtcttgaactcctgtcggggctggagtgcagtggcatgatcttggctcactgcaacctcagcctcccaggttcaagtgattctcctgcgtcagcctcccaagtagctgggatttcaggtgtccgccaccacgcccggctaatctttttatttttagtagagacggggcttcactgcgttgatcaggctggtctcgaactcctgacctcatgctgcgtccacctgggcctcccaaagtgctgggattacagacatgagagactgcacccggcctatgagtcttttctaacactgcataactagtgcatgatcaagccaagaaatgtgggcccaaattccactacagagagcagacaataacgatgctcctatgggccattctggattacatatcccatgcaacaattgaggagccctacagggcatgcttagcaattgttccattgtttttttttttttttgtcctttttaatacatagacttctgtccctcgtttattgagggttgcccctgggagaactaaatctctatcacttctggactgccctgcaaatgggcttaccaagccctcctaaactgaagaaagccttaacacaaagaaacagagagatgtggatgcttgtggtgaggaatcttcagcatccacagaatccgttcactatagttataggtgaactcagggatggctcggtgaaataagggatgaggcattatcctcatctactatgccattttattaacctttactccatagtgtaagttgagtaaatacatcttgtgatttaaatatccccttataatccaggccctgtgtttgaccatttgtctgtttctaaagcatctcattaacagtatgtttggaaatggctgttgtgtgtcgtgcacatttggctgtttgctttccttttggtttgcaaagaagtattttgcaacccataaaaatagataaatatacaccacagaacaatgtatttttttaaattttcaggggagaatttgaatcttttaaaagtaatattgagtaggcagctgtatggaaacaggcatctagttagcagttctgctacaatatccaagtagttaatttcacctctaaattacactggagaccttgaccttattttgatttattctgtcataattagtctatggttattactttaacaaaaataagtcatctttctcatgaacactaccaaagcacatttcaagtctgcatactaattaatagtaacttatttttactcctaacaagtctacacccacatactcatgtttaaacaagatgagatatttgaaatcactttataaattataatgcaccacagaaatatccattatttccattattactaaaaacttacttcattcttttgagcatgaggaggtataatttatgtgaatatcatttcatattttgtttttatctttcaaatcgagaagacttgaattttttgcatatttacaaatactataaaaatcctactaattattaacatggctgccacgtagcaatcgtgtctattttatgaaataatgtcatttatacagaagacccacgggaagttgtaatatatttggaagtaaagatttataggttttgtctatttttttctctttctcagcattaatatgtcatacatgtgtcacatttagtcttcacaattcagtatctttattactattaccatgaaacaaatagaggcaatgagacacagagaggttaagtaacttactcaaggccacagagataatgagatgtgaaactggagttggaactcaggttatttgactctgaaatgagtgtatgatgtaaccccggcctgcattgtatctaacacatgcaattttaagaggataagaattaactgtttgcacaatctaccagatggcactgtttttccaactgagaccacttaacaccttttcatatactcttggagttctgatcattcttccactctaatacatttcttcaatctcattgtcattatgtcctacttcatgcaacttcgattaattcttcacaagtatatttctacaatacttgtgctatgtttccaatgtatagagcattgcaatttttatgaatatacaactatgcgattatgttaggttctcaccataactccaatttgctaatggagcataaattctgtgattaagtggcagggaatgggagagaacttttattcaatatgagctgacatggctttccaatctggtttctgagtccaacaactccctacaataaaaaagcaattgacctacctgagaaagaagtggcgtttgcagtggaggcaaaggaacagacaggtcatccatagcattttacattgtgtcagaagcatgacagtcatgaaagatgaagtaaagggcaattatatcatattacagagtgaaattcacctagagaaataaaggcagattgtttgcaagaaatattctttctcttaattttttattcattgtagtgatgaaaataagtagcaatatttcagttccaaggctaaattttggggagaagtcattgaaagttagttttatgtctaatgggtgctcaatggataatttaggaaatgaattggtgacagaaggtctataattaacagagtagtttgagcagtatgatgaagtgcagggggaaagcattggtctaggacttagtagatctgagatttaattacagtattgattagtcacttgatttattcaacaaacccttactaagtacctatttctgcttcagtataccatgtttggtgccaggagttgcaaagacataataattctcccatctaagtgtggtcacatttaggaggtaatgagtgggatttgggctgcattattggaagacaacaaactaattttctgtttgtgtgtgtgtatgtgtgtatgtgtgagtgtaagcaagatgagatatttgaaatcactttataaattataatgcacacacaattaaagtatctgtgtgtccatacacatacagttaaagtatttatgtgtgtaacacatatgcataattagaaaaaagcctacacatatgtatatatcagaaggattgattgataagttatgccagggagataagtgtgattgtgaaaaccctcacattcgacctagatcttaatagtgagtgtcctcattctagggagtgcatgaacaaaggactaaagcaagaaagcatatgatttatttatggagaaatttggcttgtgtgactaaggcagacctggtagatgtatataaggtttgggatatgggtgactgccaacaggcctaatcgataatatgtttagaggagtacactggagtcaaattgtgaaggcccttatatgccattctgaataatctagcctgtaacctcatcagagaagctctggatttttcaagttagttctcttaatatatgattgtaacagaactgtagtttctccatcagggaatttagctttatcattgattatccatgatccaactcccctaactccacatataattaataattagtacttaccaatactaccccgtaaacacatcttgaatgcacctactccttttccagccccactgccattcattaatgcaagtcatgcttacttctcacgtggattataggtataatcagctcatgtgtcttcttatttacagtttatccccaaatattctctacactgtgaaatttatttctaaaagccaagcctgacattgctatttccctacttaaaattctgctttgatttcgaactgccctctggctatattttcaggctcttcataaataggttgatgataatttcactttttctagggtcatctctgccatttttatcctcctccaccatctctaggtctgggaaaggaccatactctttctctcacatcctgacactttcacctgctcttttgattttctggagttctcttttctaccacttgtctctctgctcttaattaactttcaaaactcagctgagatgtcacttcatcaaggaagctctggatttttcaaggtagtttccttaatatatgattgtcacatgactgtagtttcttcatcaggcaacttatctgtatatttgtatcaacatacccttttgttgtgtctgcttctctcactaagctagaaggaaaaaagctagagacactgcctttctcacagttgtttttctaccacctagtaggtgtcagtacacatttgtcacttaatagccttaaatatgaaatgtaatttattagtttcctattgctgctataaaattaccacaaatttagtggcttaaaattatatacatttattctcagacagttctgcaggtcagaaatccaaactggaacttactggactcaaatcatgatgccagaagggctgtgtacttttggatgctccaggggagaatctgtctccttgccttttccattttctagagaattcccacgttatttggctcacggccttcttcgtacatcttcaaaaccagccacctcggaccaagtccttctcatagtgctttctaattctccccttatgccaacatttccccccttttaaggacccctgtgattaaatcctgcccactcagataatctgggataatctccctatcaaaagttagctaattagaaagtctaattctatctgcaataattccactttgccatgtaacataatttattcacagatgtcagggattagcacgtggccatttttgaggaggcattattctgcctaccagagtttaatagaattaatatctgcagaggagaaaaatgagaagaggactaaaaagtaaatctggtcttcgttaacttaaaacacctttattgagcactactatgtaacacattctatgctaagtgctgggattacagctctgatccagacagtcactctcttggaaatgagaaaggatgtaggtgatgttattaagaacaacttttgtaggatgatgagcagtgaagactgcattacattgactgtaaagcgaatgggaaataaagaaatatctttgacatgaacagcttttctgttcttcgtgcagaagtttaattattttagacctcctcattgtaagctgaccactaacgtcacctcaggcggtagaaaaatcccataatcaaagactattactcagatttaatagaaagcatttttcataccattttccattgcagcctcctccactctgcactgccattttgtaatattaatggcacagtaaatccactttctaaatatgtcctaaatttgtttccttcctttataatgctccaaaatatcacataaccttatctaatgtttatcattaatcttccatatttttcatttttttctcatgtttgatggaagcagagaatagactgaacttaattgctctcccatattacttcatagttctttattttcttttctttcttttttttttttttttttttttttttttttttttgagacggagtctcctctgtcccccaggccggagcgcagtggcacgatcttggctcactgcaagttgcgcctcccaggttcacgccccagtagctgggactacaggcgcccgccaccacgcccggctaattttttgtatttttagtagagacggggtttcaccgtgttagccaggatggtcttgatctcctgacctcatgatccgcccacctcggcctcccaaagtgctgggattacaggcgtgagccactgcgcccggcttcatagttctttctttaagtgaaattaactcatcccattgcatttcttcactacgtgagtttctaaactggtatcaactttaatattcccttccccttttaaagatacattttctgtgtcacattagggatgaagatcttcaattaacatattaactagcccccaaggaaatatcatttaaaaaatgtttttctaggccgaatgtggtggctcatgcctgtagtcctagcactttgggaggctgagacagaaggattgatggagtccaggagtttgagaccagcctgggcaacatggggagaccccatctttacaaaagaaaaaaaattaaaaattagacagatgtggtgatgtgtgcctagagtcctagctactgaggaggcagaggtgagagaattgcttgagcccaggggtctgaagttacagtgagctgtgatggttccaatgcactccagcctggggaacagagcgagaccttgtgtcaaaaaaattttattttcttgtacagattatggttaattgctttgtgtaatgggaataattgttagtgtttatagaactgtttttctgtttttttttttcccccagtttttaaatgctttcacttacattgtttatctgatggcagagaagaggtcttaaggaggctctccagcatctcgctcctaactctcattgcaatttcattccatgccactccctttctcacattttagagtgcaacaaaacagaattgcataatgaatgagcgtgtactttcagtttcttatcactctgtccttgtccttactgtctgctcagtgagattcatctttatcctcctcctacctttattccttctttactttctctcatccttctgaactcaacctacccattaccttctccaaaatatcttttctaacacccatgtggctacatattcctttctccatgctcctataatacgctttaaatttatatatatttttgtttatgcaaaatgtttcatatttatctatgatgtgtctattatctactaggctaagagctctcccagactgaatcttgtttatattttcagtaactagtgcaatgtccaggtcatagtaagcattctgtaaatatttattttataaattattacacgagtaaatgatctcattatatcctgtcaatagctccatgagttaaagagcaattaatattctcatttcacagttaaagacgctaaggcttggcaattttaaggccacaattctaataagtcctgcaaagccactggaagccagttccacagatttaatgttccctcagtttgcccagtatcattcttctgcagtaacttgctcttgtgaatcaagaatattgcaatttaatatatcccacatttatattcctgagggactaaggaatataaaagttaataacagggtaaaagttcattgtactaatcttaaaaaatatgaaaggccacatatactgaataaaaataactttattagaaggggttaaagattactgagaggaaatacaatttttatgtcatgttagaaagctaattttatatgggatttccccgtagagagaataaaataaaacgttggtcagtttttgcaatttatgaagtagtggttcttcacttcttgacatctccagggaacagttttcaagtaaattttcctaagagagattttcttctttgcctctcttattaatatgcacatgcatgtttttattagtaaaataaaatcagttataaacaaaccctaaaggaaatgaaatagaatatgtgctgcttgaaatgactaaacaggagcatataatcattttgtaataaaacagctatcactttattcttttctcatttgctttgttgctgattgcacattaatatgttttactatagactatgtgactacagaaatagacatcatgttaacgtatcaaaatagtttctagaacaatttatatatgtgtgatgtgtatgtatggtggctttaggttaactaagggtatacagcttaaaatagtcaacttttaagcaatatgacaaatagcaataaaaatatatcaattcaagtaaatacgtataaaattttagcatactaaaataaaaattaaaaggcatatgaccacttgggaaaatatgtccattcactgactaaaagtgagtagcttaattttgatcgttaacttggattttatggttataggagttttctgcaaggaggtcagtgaactctatgaaactatatgcaaatatgtatgtgtagacatttttctatagagaaggttcattattttcatcagataatcaaatggagcccatgacttgaaatgtttaagaattaccaatatataattatctcattccaattaattttaaaatattaaatgctcaatagataaatgagccaggatgtaaacaagtattttgacaaaaataggaacatacagaataaataaatgcatgaaacatcttctacttcattagtaatcaaattaattatgattaaagcaaacatcaaggatctccttacatctaaacaaagcagcaataccgtaaaagactaaagcaacgaaactcctatgaatgacatacctgcggctgagatgataattcccaacctcattctttctgctaccagtagaagtgggtgtgatcacttggaaagtattataaagatatttagcaaaagtcataaaggttttcataatgttgaactgataattttttcgaagacaattataaaaacaaaaaagaagtgagtgcatgagcatgtttattgtgatttagtctctaatagcaaacaaaaggaaagagcagcttatatgagatttatgataaaataagtgaaaaagaaagaatattattttggttataagaaatatgtatttatggggaatttaaaagtgtggacacaaaaattttgattgatttttggatgttaaaatgtttccataatgatatataagacgaaaattgaaataccaaatatcaattagtaaatgtaaaagcattattatttgaagtattaacaaccatatcatccagcaccattaaagaaggctcattattcagttctagatcagttcatacagacaaataagttatgcattgccaaattccaggacgctattcacataggttacaacatacatggaacctccttgagttgttcaaaatagaagctctgatttcatggttgttttgcatttgcgttaatatgttcaccttttgtgactctgattatcttatggtattctgtattgttaattatgcaattataatgtaaatgatagatatctggtcaatgtgaaaagccatggactttgattcagaaaatctgtatcaagttcatttctgtcacttaatagctttattccttctcagcttgtgtttatgtataaagtagtaaattacatacagattgagaagacataattaaaacaaacttatgaatagtaaggcactaagaattgttatgtattttataataataatacaattaattgtattaataattattatgttgaagaaaatatatgctactataccaaaataagacaataattcattgaagacatttttcttgtattaaagacgtagaggtgagagaggacaactagcaaagatgtttatatgttgaagctcacatttagtgttatttacacagtaaataagtaacactttgcacataatgtcaaggttttcgtgctgccttcgatgcttacctaaaaattactccttgtccatataattgaaaagaataaaaattttattctactacgtatttttcacttaaaagcctctagattaaatcacttcaaaagacctcatattgagcttttggcagagggttttgggtatgtttcaaagacatctgaatgtatgctttcaactgactcatttactctctgctttctgacagaaagtacgcatgcacatgtaggaaatataagtggaattgcaaataaggtcatttacttttaggaatatatgtatatactactgataaatgatgcgttgaccaatcttcctccataaagtctatgaagatggtttaattttgaccatttgaaatgttccatttctttttaaaattattttggaagggctagtattaattttatgaaagtaaagatttgaaggaggctagaataggtttgaaaactattactatctgtttttatttattcacccttgtcaacaaaggaaatacttccatattgtagctaagatttatcatataccatatgaataatgttgatattgaacatacatatagaagcttgtgtgaataacataattaaataagaaaaatgtattttgtaatgctaaataaaatttctcacctaagatgacagtttgaaatttatttattcactgttatttctcatattgactaaaggaatctacttatagattagtattgtgatttaaagataaacagatatttttggtgcatgcatatatttgttatgcgaaagtgattccttatgtttttaagagaagcaacggagatttactactgaaaaatatatgagagcaaatatgattactttgtaaagggcattttaataacggttcttttaatccaagtagataaaatataaaatttatcaattttaaatatctctcagatgcattcatttactgaacattaactaatatgattatatttacaataattaaaaaaatagtcttttgcttggagaaaaacattttaatatatcaagattgatgatttttctgtccatttgacttaatactaatttccagtttaggggcaaaaagatcatttgtagaagcatgaattcagtgaagctgttttttaataatttttctccctaatcccttagtataaatctttggggacttttttctttgagtatttatatgtaaggcatgaagagtatcatttgcatttttatttgaaatgttctgacttttagatgaaaagaggtcctagaaattttagagttgtagaatctccccttccttaaagcatgcacgtatttgtcagatgtattttctgagctcttaatttgttcagacagtgtgctaagttctgggaagcaaagataactaaaccatgctcctgctcatcaggaaacctcttccatagtgagatcaggcccatgttagagtatgtagatgctgcaaaggaaggaataatcatttctccatggttgggtggatggcatggggaaaggctccgaaatagtttttcggagtaaatgacagctgagagtttcttttaattatactggagtatctattcataactggcgaataaatactgttattcagaggagactatttttttataatcatacagtatttgaacgactatgggtttggtcatattaattgtttttcagatattacaaatctgaggcgggatcttgctctgtcgcccacgctggagtgcagtgccatgatctcggctcactgcaacctccacctcctggattcaaatgattctcctgcctcagcctcccaagtagctgggattacaggtgcatgccaccatgcctggctaatttttgtattttcagtagagatggggtttcgccatgttggcctggctggtctcaaactactggcctcaagtgatccgtcctcactggcctcccaaactgttgggatcacaggcgtgagccaccgcgcctggccatttttcagaagtaattttaatttggatgccccaaaccagcatcactcatgtttaattccatttatcaatgaatgtaatactaaatgtaaaaaaacactaacacatcataatggaaagttactttggttgtaaaatatgaattatatttaaagttgcttcctaacttttatttttttattttgcattttagatgaaagagaagatgttcaaaagaaaacattcacaaaatgggtaaatgcacaattttctaaggtaagaatggtttgttactttacttttaagatctaagttgtgaaattttcaaaatggactatgtacctgtgtatcttaaaaatccgttttatttctctcatagtgtcattttattttagctgtgcaaatctggaaatattatgttcactcttatttaaggagtaagcagcagaagatatggcaaagatacactatttaattatataaaatgtatatctttgattcttcttgacaatgtgagtttctttaatgacatgagtcctcagagtttatagctgcaatcttccatcaagtagctagaatatgtcacccagcagaagaagatatgagggaattttgttgtgaaaattatcatttttttgtccctcttggtctttaccaagttcaagaaaagcaatataattgctttgggtgtattcagccactatagtttagagcatatttcaaatgattaaagacaataagttcatcttgtttttgtgcaggcttcaatccatactcttaatatttacttaatttgcaaatacaactcaatttttaatcaatagcgtgactctagatgattataggtggacacagagcaagatattcttaccttgaaaactagtattaggaatgcaatatatggaggtttattgggatgtcaaagtttaaaagacttgcattttaattattattctcgatttgggtaaatcaatcaaatgtttggtgagtcggttttcttatgtttccatcatgaatgtttgtatatgtatatattgattgcttaattgagacatcaaatctagataatggaaaaataaagctaataaaatatggcccttaaacccaaggctttaagagtggcatagttttgatagtggatattttgtttcttattgtaatgatttaaagagtcactaaaagtgaaaatttctactaaaatgcctgaaactcttaatagctatgaattactccctctatgggtctgattttgtaaaattcatgataatggagccaaaacaatccactaggagatccaatctcaaaagttctcccttttctatgacaaacatttttagaatatcgtctattctttgtggtatttggtagtagaatgttgccatgtactctttaatttaacttactgaattttaactaataaaagttcattttatttacttgctgaataattaacaaatttctattacagacgtaaacagaaacatgtattttaaaaacgttttttaaatcctcaactttttttagctaagtgaaataaaatataacaacacaaatatagaagaataaataaaaagtaaacctaggatatttaggaaagttattcataattctccgaatatttataagatggttatatatagtttaattgctgtatatactggcatcattgacatttttaagttttggaattctgaagcagacaagagacatattttcaaacaaacatacagacaaatcagaattgtgaagaaattttctgaaatagtaaatgtaacaatactctgaatctttgaattgaactagagtaatttttaaaaggtgtgtaaacatgacaagtactgtgtatcctcattcccgcaagttgaaatagatcttcgctctgtgcattaaccttttccattatcatttatcacaactcacctgttaatatagaaatcaaagcttgatatccaatccatcctctatttatatattgttagcactgcctcagagcaattcggtatatttttttctgtccttatgaatgcccatatcttaaaactgtaaaatattcacatatatgagcacatttattgttttcttccaaaatatttgcatcctctaactcaactcacacttttcatttatattacaaatgttctccctaagtctgttataactgatcaggagagtcaccattctttcaagtacagaaattctattatcaagcatatcctaggtgtcaggaatagaaataaaagtttacaaagacagaggagaaaacttatttaaaggtaaaatgtatatatacctgtgcactaacttctaattttgagaacttgcaaagaatctttttcctcttttcttattcttttctgtcaaaacttagctaagtgactgcattcttttagacacttttgaagaagatgggaatttagaggaagctagttgattcagtttaagccacttggtgaaaccaaaagataaacataattgtgatatatatatcatttggcaatttattgcatcgctgcatgcctttcagcagaattctagccctgtaggatacacagattagttgaagtggaatctcctgaactcatggaacctacacagttatttgggagtttttggttaattgataaatggagttagaactgagtgggctcagtgtgggtggtctgagaaggcagtaatctgagctagagggaatctggtaacctttatgaagaaagctctaaaatgtgagcccatcaaaggcaggaatgtatatcttctatataatctcattgtttattactagtacactatataaatataataaatatactaggtcagtagtacaaatcattaaatctatgctaactgtagaaacagaagaaaaactgggtggaaaaattgtgttgaagaagactttaaaaagagaaaaaagagaatgaaaaattctgtctgtgtggtaaattagacacaggcacacacacattcatacaactataaaaatgcctcactaataaatctaactcatattcatttttatagtcgtattaatgtctatctgtgtctactttaccacacagacagatgataatttttcattgccttttatacacacatttatataatatttgtaaattatagagagacaacaaaatatttccttgttattttgtaaagctacggaagggatatttaaaggaaataaatgtgattaaatgtatccttgttgttgtggcgtcatttgaagccaaatgtgtctttgcagtaaatctaactgattttccactttcctggtaccattttaaaaataagccctatctctttttaaaataagtcttctattaactttgattccaaaaaattctactagaatgtgatttatcacatctattatatagagataactgaacaatatttatctccacataaacacaaaaccatttctagataagattaattcagagtaaatattctttccatgtaatttattgatatgttataatcctttaaaaagcctcgtgtatactctatgacaaatatgattcgcattataaaaatcttgctcatccatgccggcttaataaagggaagtacagttttgaaaacatgaccaaaaataattttgtcataaaatgtgcttgatgtttgtgtttgagaaaaaattttatgggaaaaaatatttactgccagctcaattgagagagataaactatctcccaatgagtgatatgatggttttgatcctatactgaatttagtaatcatctttatttccatactcactcttctgtctgatttttttccaacatagtatgcatgtttgacttaaatgaagtagaaatgcataattagttttgtctaatgtcttcacaaaagcccatgatatgatagtgttcctggaccaaactgaggattgggctgcttattcttgtggcccaataacgagatgcagatgaacgggaaaaggagagagtttttatttctgtaagtggttacagggagaagacctggaaattatccccagaccaactcaaaactataaagttttccagagcttatataccttctacgctgtatgtctacatgtaagtgtgtatccatctaaagacataaatgattaacttcttctgatctgtaactaagatctgattcctgaagacattcctctggagcctcagtaaatttactttatctaaatgggtccaggtgctgggatgattacccttatcttatctccggctaaatcatggagtttgggggagttccttcagatgcccagtaaacttgtttgtggagtcctggggagtttcttcagacccccaataaagcttttttaattctaaaagggtcctgttaagaattccttcattatcttgtcatgcttcaaggcccaggaaaggcctgggcaaaactcttggtgggcttttgttaccgtccagcctttgtttaagggcgctggctctatcagcttttaatatgtaactttaccactcagtcagtgctgaaacagttgttgtggaggcctgcattagtgagacctggcctgccacaatagttcatttacctcttcattgccgcaacatatatgtccacattaaaaatccaggactcaccctctttgggcaatatcatgtgataaaataaattgatatgacatacttcttgcaagatttctttttaatttaccttttagccagcatgataagcatgatgtagggtaaattaacactaaacttttgagtcagtaaggtagcctttctttttttaacttttattttaagttcaggggtacatgtgcaggtttgttatataggtaaacttgtgtcacgggggttggttgtacagattatttcatcacccagatattaggcctagtacccattaattatttttcctgatcctctccctcctcccaccctccaccttccgataagctccagtgtgtgttgttcccctctatgtgtccgtgtgttctcatcatttagctcccacctataagtgagaacatgcagtacttggttttctgttcctgcatcattttgctaaggataatggcctccaactccatccatgtccctgcaaaggacatgatctcattctttcttatggctacatagtattccatggtgtatatgtaccacattttcttggtccagtctatcattgacgggcatttgagttgattccacgtctttgctattgtaaatagtgctgcaatgaacatatgtatgcgtgtcttataatagaatgatttatatttctctgggtacatgcccagtaatgggattgctaggttgaatggtagttctgtttttagctctttgaggaatcactacactgacttccacaatggtttaactcatttactctcccaccaacagtgtataagtgttccattttctccgcagccccaccagcacgttattttttgataaagcaggcttcttcacactactctctaccttaggagaaaacgttatatccatactttaatttatttgaaaagaaaggtgaatataaaattgaaattctctgagtcttatttttcttatatgttcttgcctacttgtaacaaaacatataataaaagggcattataaatagtaaatcatataaacacaaaatattcccatttttgtcattatgtaatgtattttctgaattgaattgaaaaatgcatatatttatgaatttttttctactgaatctctccttcttatttacttctattcttttccatgatgttacctggtcttcttgagaacatgatattttaattgtaatcattgtgttcctaactccataatttcatgatgctattgaaatgcacatgaattttgattctataacctagtttgtaataagccatatttccttgtttctctacattggttgaatctgttcctgcagcaactagtaaccccaacaatctgactggtgagaaattcaatctccgtaacattttgcattcttctacttcttcccacttccattccaaagggccaggtagagtccagaatactgtaagtgtcctggttttcagtgcattttggtcatagctgatatgcttaatagccaagtaaacatgactacataaaggacagcttgtccacaatgccctgccttgcttgaacacggaaggttttgctgatgatgctctgtgcttggtatctggcctctacagccatttaagtaggttgtctcagcacaacatttggaaactctgtaaagggagtaggatgttggccttcacaacttcatccctttccctgtgtttgaggaagctcattaaacctctctttaatctgactgattgcaaatttccactgtccccgaatcttaactcccatatcccaatagcctgttcagttgggacaatatatcaatccttaacatgaatctagattttcagaactaaagtttttgaagggtgattttcctctggatacttgttcatttctttattgattatggttttggctaccttcttggcatcaaacagggaaaacagagcatttattcatgtgttactatcctattacactctgtatgccaattcatgtcctcaacacgtacacacaaacacacacacgcgcgtgcgcgcacacacacacacacatacatatacacacacccagtaaacatattctatatttaaaatgagcttagaagtttttaaaaaaggatgatactgggacaaagtggcaaaacattatttcagtgaaggaggtaacaatatatatgtacctttccattgtgtaagtgaattctaaatctgtatatagctaacacatttatatataactattgtgcaatgtgcctgctttaacagaagtaatcgagcagagctattgtgccatggaaggttttacatagatctaaaatggctcctgtgcccctggcttcctgtttgtttttatctgataataggaagaattaaatcattagagcagatgacgtacagtgaactatgtctctggatgctgatgagcagcctgcacaagactttggtaacaattgaattatttagtgcaattattttggagagatgaatattgatacaggaaacttacggaaatcctcgtttcagaaatagtgaggattgggaactttttgtttatgtataccatgatgttaataatcctactgaaaattatatgtatatggttagttgctccaataatcatatgatacaagtattcaagatgagtaaaatgtgaatttatgtggcttgctcacagtaaataggagagatgaagctaggacccaagaaaatggactctaaaactcatgatatttccatacctattattgttgggacaaaaattccacctacccaataatgcatttttgggacaaatcatcaaattgataagtcctatgagaagcaggcaggggggttggagacagtgaagactcaataacaggtggtattaaatgctcgcttactcacagaggatttaatctacctttgaatgtttagtaaccccaaaatgcaaccattgtttaggaagttttttagttgattctttctgaatgatttctaatacaaatgcccctcaacttgtgtggttaggtccctataaacccatcataagttgaaaatatcacaagtcaaaaatgcctttaatatacctaaccttcgaaacaacatagcttagcctaccctactttaaatgtgctggcttaacactatcctagagctgggcaaaatcatttcacacaaacctattttataataaagctagctcatgtaattgattgaatactgtactgaaagtgaaaaacagaatgcatgtatgggtactcaaaatacggtttctactaaatgagtatcaccttacactattataaggtcaaaatatcttaagtcgagaactgtttgtactttaaatgttaatattttttacatactgcgttttggtgagtgaagtaaacttagtttgcagtagagttatctaaagtgatattgtcattttcaaacattgctttttatttctactactcataaacaaattattgtgtttacatgattatttgaatattaacttaaaacagttttatacgaaattcaaaataccactttactggcatgtgaactccctaacatctacacttggtgttaagatgacttgtcgaatgatgtgtttgtgtttggaatcaagatgattatactaaatggtttaatctactgagaaccattcccttgaatgttttcctgaaacaatctttgcaaagtacctaagtaacaaaggatattactcagttagtgagacaaaaatggattgtgataggtctcactgttttcaaagaaagacaaatcacttattgttaatagtaaagaagtttcttagaaatatgttgctgtttatcaacccagtgttactgagatcttgacaattccttttagaaggtaaatgttttggtctctaggttatcatgtcctgatacaagaaaattggaattattgattacacctatattctctggagtggtctcagtgccaagcatatttagcttgcatatgtaaatatttaccaattagcatgatagttgctagcaaaaaaaccaattctttatggctgatgggcctatccattatttatctgattttattttgctttctagcaaaacaacatacatggacattagtgaagcatttttatttagaaaagaacaattgacactctggtaccatcctatcagagatatatgtttactaaaataacctttcaacatttaacaaatacttattgaatgccagctatgtgctaatcatactgtcatacagtgatgaaggcataacccaacatggttttccctctccaagagattatcatctgagaaaggaaacaattgcatcaacaaataattaaaataaaacataatctttaatgcaatagaaatgctgtgggaacatagaagacagaatgactaattgcttggagaggataatagctttttaaaatatggtgacatttagtctggtgttgtctacgcagagacaatttcaagaaagatgaaggcagaaggaattgcatgtagaaatgtgtaataatcaaagaagtatgacttgtcaggtgagtagtagcaagggagatctttaggagtgaagaagagaggttgtgagagggcatataatgccattcttgaagaattatattgttgtggggctggttgagccaacaataagataatggcttagtcatgttaatttgcaacttctgattgaagactgtgaagctctaaaacaacaggcaatgatagaagaattagactgccccaccaccactaatgcttcatgcaaaatttggtctgaagtctaccctttacatttggcaatagacatagagacctaaaatggaaaagcaagcaggctaccatttttgtagagttgtttgataccatgcacactccaaaacgatgcagcaaaacgcattggaattacctagaaaatgtgttaaaacatggattgctgaggcccatagtcagagtttctaattccataggtctagggtgggacccaggaatccggatttctaacaggtcctcaggtgatgctgatgctgacggccaaagaaccacactttgagaaccacagtgttagaatttcagtaatttaatcaggtctgtagtagagaatgttggaggaaaccccactgaggaatttattgaaccctcaaaggggaatgacctttttccagttgagaatcaatgcaagtacttgatttaaattgggatttattttgtggggactatactcaaaaactgaatgagttaaaagactcaaaatcaatcaatctgatactgattgagcattcttcgtccaaaacgtttgaaaatagaaatgtttcaaattttggattttcgtttggaatatttgcattatacttactggctgagcatctcaagtccaaaaatctgaaatccagaatgctccaatgagcatttcctttgtgtgtcatgtcagccctcaaaaggtttctgatttgggagcattttggatttgggatttttggatttgagaggctcaacctatacctattttttaaaaaatgtgtatatatatatatatggatatacatacacacatatatatgtacatatatacatatttatacacatatatgtacatatatacatatttacacacatatatgtacatatacacacatatttgtacatatatacacacatatgtacatatatacacacatatgtacatatacacacacatatgcatatatacatacacaaatatatgcatatatacatatacacacatgtatatatacacgtatatatacatatatacacacatgtgcacatatgtgcatatacatgtatatatacacatgtgcacatttgtgtatatatacacgtatatatacacatgtgtatatacacatgtacacacatatgtgtatatacacatacatacgtgtatatacacacatgtgtatacacacatatgtgtatatacacatacacacgtgtatatacacacatgtgtatacacacatatacacatatacacacatatacacatatgtgtgtatatacacatatacacacatatacacatatgtgtgtatatacacatatacacacatatacacatatgtgtgtatatacacatatacacacatatacacatatgtgtgtatatacacatatacacacatatacacatatgtgtgtatatacacatatacacacatatacacatatacgtatacacacatatgtgcatatacacatatacgtatacacatatacacgtatacacacatatgtgtatatacacatacacacatacacacatatgtgtatatacacatacacacatacacacatatgtgtatatacacatacacacatacacacatatgtgtatatacacatacacacatacacacatatgtgtatatacacatatacatatacacacatgtgtatacacatacacacatatgtgtatacacatacatacatatgtgtatacacatacatatacacacatgtgtatatacacatatacacacatatatacacgtgtatatacacatatacacatatacacacatgtgtatatacacgtgtatatacacatatacacatatacacacatgtgtatatacacatatacacacatacacatatgtgtatatatacacacatacacatatatgcacatgtgtatatatacacatatatgcacatatgtgtatatatacacatatatacatatatacgtatatatacacatatatatacatatatacgtatatatacacatatatatacatatatacgtatatatacacatatatatacatatatacgtatatatacacatatatgtatatgtgtgtatgcatatagacacatatacatatatacacacatgtgtatatatacgtgtgtatgtgtgtatatatacacacgtatatatacataagtgtatatacacatatgtatatatacgtatatatacgtgtgtatatatacatgtatatatacatatatgagtatgtgtatatatacacgtatatatacatatatgagtatgtgtatatatacacgtatacatatatgtgtatatatatacgtatacatttatgtgtatatatacgtatatatacgtatatatagttgttttaggttataagacttaaaaatacttatctgatgtatatatatatttttaacaatcctagttattttgtgtttcagggcagataggtgatgaataaagatattaatataattgtgttcaaaggttagaaaaaaacagttcgttgtggcattactattgactgtatccgcaaatttctttcactgcaatcctttcatgggctactatatatttttcttaagaataaaacatttccaattgacctacagagtctttcaatctctcttttgtgctttactttgcttcagcagaaggatttcattttagtgacactctgaaggtcttcctctgtgcttcacttaagggtgttgcatttttaaccttaccaagattcctatggattcctagaattatatttcaaattatgatcatggtagccagaacacaaagaattaagatctactctgacagtaatgtactgatataactttaactgtagaaacctttcttgtaatgcacatggagggcagacttgtatgtatcttggaacataaaaggcagagtatggtttttaaaagggctttgcttatttgtatcctaatttagctaatttcactatgccagttctatatgcagagataagtaatagtaaaaatggacaaaaagtgatcaataaacaagtgatcactttcggtcttgtccagaattgtggccaggtgatgagtgcaaactaagagaccttttcattagaaatgtgtgaagttactctttggtttagcattagctgtcttttaatgagaacaaatgagagttgcagatgaatttgctaaatgtttctttctttgatttagtttacctggcctgaagaaaaaaaaatgtcttcgatctacaaggtctacggagagtacttttcataggaactagtcctattaaaattacctgcagttattatgtcagtcagagaataaatattttgagtatcatatctgtacttgaagttcttatcctttacaaataatttatatttaaggaaacatgctttgacagaaatacacatgaagtctacattctctatctatttcatatcaggtgctctagtgttttgaatataacagttaagagatcaagtccctttaatcataaggccctgttagctagcgagctaaaccaaagagggaaacatttagcaaactatctgacgttctctatatttgtttgtcaacttgtttgttttttctctctgcaagtagaatatagaatttcagagagtgacaagtgctaagagaaaaaataaagcaggataagggtagaatagggatatttcaaagggtaggttgccattttatgtagtgggtcctggaaaagcctcacttaagaggcatacaaaaaacctgaaggaaggaaaggagggcatcttgcaggtgtcttggagaagagagttctaggcagagggaagaatatgtacactctgaggagggagtgcgtgtttgtgggataacaagggagtcaagatggctggtgcagagtgactgaggaagagcggtaggatctgcaagtggagtggtattagaaggacaaatcagatagggccttattgaccattgtaaaggtcttggcttgtacattgtgggagattaggagattttgagagttctgaacagtagccagaaataatgtaagttagaatgtaggatgtaaaggtagaagtagagagatgagttagaggataatgtagtaatgaaggctgggtgtgtgcgtgtggctaggattaggttgatgtccatggatctggggagaaatgatcgaattttggatacattttgaaagtagatgtaacaggatttgctggtggactaaaaatggagattgagagagtggagaaaaacagttttagcttgagcaaaaggaaggatgggatggttatttactgggataagaaagactattgcaagagagagtttggtggcaaagtataggtaaatttcccatggaaaatcattgaaaataattttagttttagtatgtttttatggaaggagtatttattttcaactcctaaaatttatcctcaagaacaagaataaatacatttatctctattaaaaaataaggaacaatgagagatgatacaagtgcctctagcattgtatgagtgtgtacaaccagtgaacgttaacttgtaaatccagtagcagtaacttgatctttgtctctcttctgatctgatagagtgcaaggtctatgtctacattcatttttttgcatgtagatgtccagttgtttcagcattatttgttgaaaaggctatctttgctccattctattgccattgctcgtttgtcaaagatcagtaaactgtattcatgtgggtctatttccacactattctgttctattgatgtatttgtctattattttgccaatacactgtcttgattactgtcatttcatagtaagtcttgtagtcagatagtgtcagttttccaactttgttcttctccttcaatattgtgtgggttattctgggtcttttgcctttcatataaactttagaaacggtttgtctatataaggcaaggtaacttgctgtgattttgattgggattgcgttaaatctgtagatcaacttgaggagaactgacttctttacaatattgagtctttctatccatgaacactgaatatttcaccattcatttagttcctctgataactttcatcagagttttgtagttttcttgtaaagatcttgtatattttttagatttattcctcagtattttatttttgaaaatgttagtggaaatggctttgtgttttacatttcaaattccacttgttcactgctggtgtgtaagaaacaattgaattttatatattaatcttgtgtcctgcaactttgctacaattgcttattatttccagggttatttttcgattctttcagattttctacatagatggtcatgtcatctatgaagaaatacagcttcatttctacattccaatagatatgtctattttctttgtcttattgcattagctaggacttccaatatgatgttgaaaaagagtggtaagagagacatttttgtcttgttcctgatcttcctgagaaagttttcattttctcaccactaaataggatgtcaattataggtgtttttgttcatttttttatattgtcatgaccttgttttataaaatacaattatttctctcctaactttctgtggacctcaattataattttcccataattctcttctgcttgcattgctcatgttttctgtcttcttcccatttgttcttatttgctttattttgaggaactgtttctcattattgaagtcattcctcaaattacaagtgatcttagcttttggtttatatttaagtgtgagatactaacatttgataaaattaaaatctatttcatgattaaagtacatttaatataaaacagaattgaataattttgttgacatattatatatatatatgcgtgtgtgtgtgtgtgtgtgtttgtgtgtgtgtaaagtccaaaagtttgtacattacttaaagaagaaacatctgatgcattctggataaagacaggaaaaccatatgagtactacagctacctccattaatacttaacattgtgttgaaaatattagccattgcaaccagacaagataaaccaattcgaggcaaaacaattgcaagcagtggtaatgggatcccaatttacagatagaattgtttacctcaagagatcacacaaaacaataatattaacaaacacaaatatgaacacaaacaaataccaataaaataatttagtaagttagcagactataaaatttacaggcaaaatcagtaaaattcattttataggtaatgagctagaagtttttatggatggtgcacacccatttgcaacaatagcaacaacagcaaaaacaagaaacacatttaacaagaaatttcagtacctatgtttaaaactctcctgaacaacccaaaaggaaatcaaggagaaagatgctccttgttcctgaaaagcatggcttaacattataaagtaaactattgtttttaagttaatgtgtaaattaaaggcattccaatataataagtagtatttttttctggagttggataaattgattataaactttttataaaaaaatacacaagtaaaaataaccagaaaaacactaaaaataaatatcgatgaagggatagggaaacataaaattataaattaaaacttagggaaaactatcatattaaatataaattttcaataaaaactaacaatttgttaaaatgtgttttgtaaaaatatatttctatcagctgggaaggtctggtagtaatgagtatacctagcatgcagatattcattggtaagtctcattccacactgaaagaagtcacagctcattagaagaatatatgatacttcatcctggccaaggaacatagtgggtgagcctgcagcctttgttagagccataaggcaaggaagtacttcccaaaatttgctaacatcttgagttgttcatttttcttctcctgttttctttatgcttgtagagttacacctttttaaaaggttttcttcctgtcattttattggaaaggcttcaaataatttttaaaacatatttatagatgttcatactcatatattttcctgatactgaaagagaaatttatgcatttagtaacaataaatgttggcctagattttctctgatggtctcttcaagaatctggagcgttctctatctccacaaaggatggaaatgtttcatttcaatatgccagttttcaagtaaatgtgatttagtttctctcttttaagaataaagtcatagcagaatgctttatattactgattgtagtatcataacttacttctgaaacatcgaatacaattttggaaggtcagcaatgtcctgttaatatttaagtatgcctcactatataatatgtgcatacattctggaagaagcatttaaaatgaagactgtttctaataatatattaaacgagctatgtaagtagagttttatgatagctgatattgtgattttattcagagactatttatataagacatttcagcatatctgctaaagaacaaacctatcatctaagtcagtaaaccaataatttgaattaaaaaaacggacaaaaagaaaatacgaagcaacttgaaagatcattaaatacactgcctgatagttaagattctaaacagttacattatatgaatagtttactgtatattatatattttctatttccactttgttataggtaagctaatcagatgtctcaagttataaaataatagcactaacttataaaagaagtgctacctttcttccactccccaaaatacacaagattttattcttcataaatgataacatttgttgtttgttttctgtggttgaaagggaagtacaggaatgaaataatgtattttgcaacaacttggatagaactggaggccattattctaagtaaagtaattcaggaatggaaaaccaaacaccgtatgttctcactcataagtgggagctcaactatgaggatgcaaaggcataagaatgatataatggactctagggactcagagcagggggaagggtaggagatgggtgagagataaaagcctacatattgggtacggtgtatacttctcaggtgatgggtgcaccaaaatctcggaaatcaccactaaagaacttacccaggtaaccaaaaaccacctgttcccccaaaagtattaaaataaaaaaatttaaaattttgaaaaattaggaaaaggaagtacattttcatgtgttgctctgttttagcacacctggtgcagaggtccctgaggaattttttctttttcttttttcttttttcttcttctttttttttttttttttttttttttcgagaaaaaaatatcacacatttgaggcaggagaatagggtctggaggaagggaacctaaggccatttcacgctgacttccctaggactaaactgaaggcaaaaccctaactttccacccctaagtaacataaggaccagaggctactccctttgcaaacctcccaccttttctgtgtagcagatgggaaattggctgttcccaaccaatcagactgattgcgggcccagtctttgcacagaagtgcaactttgtaacttcaccttagcctctgattggttgctttttgcaaccaatcagatgtttgcacaggagagtgtcctatgtaactctacttcagcctctgattggttgctttccacaaccaatcagaccaattgcaggccaccacttcatttacgtggggtgagcatgaagtggccaatgggaaacctgtagagggtatttggaccccagaagattttctttatctgggcacttgagccgctgctcagcccgctctcacactatggcatgtacttttcattttaaataaatcccttcattccttccttgctttgtttgtgcattttgtccaattctttgatcaagacaccaagaacctgggcaccctccactagtgacacactgataagatcttattatattgggctgataattcacctacacttttaccttctgaatagaaaaggcacttgattagagatgtatatatctaggtgctgggatcaactatgccatttgcaaagtaccttacttcttgagcaagaaggtaaccaaaaggggaatgaataggcaatataatttcttttaaaaatgaattagtaagctcttgtggttacaacaagaggactgttgttttggttctttcacaattttctatagtaaaatttgttagtattaaagtataatgttgatgcctatatttttaaaagatataaaagtagagattttaaaagagaattaaaaaggttttgagggaactgttttagattaagtaagataatgaagagaaacaatgcttaaaatattagaaaaaaagacttatgagaaaagtcagaagtactgaaactgtctagccaaagtagaaacgaaaccaaatgatacctttctcattcatattaattatttgaatgctttggttttgtttttctttattttatattctgttagacgctgtctttcttgtcttcaaccaattcttttctatgtaacattagacagtgtctaataataatacacaaaacaaaaaagttgtaaagaaaccacccacattttctcttcaaaagaaaaaattgtctgagaactctgaatgtctaaagtccttgaataataatgggaaatggaggatggttcatgagtgtttttcagtattagcaaaagactgacaaaagcatgagtttatcaacaggaagtacatatagtcagacttatagactgaaactgttcctaaagctgtgtgtccctgttttagaactatcaccacagtcactgaagccctgggcaattcacagacattgcaaaatcaccacagtccctgaaggccaaagaatgagacacaggagtcttttatcatttcataactcagtgtgcccattcttcctaataggcaggacccagcatctgtggtcctcaatacaaccatttagaaagtcacattgtagtcactccttttgcttgttctggcagggactgaagttggagcacaaaaaatcttgtaaaattcagttcctatatcagggtgtttccccctttttatcatgaagtcacatgtcccatcctgtgtcttaacagtaggtgattattagaagagtagctggcacacagtagatttataataaacaatggaataattagagtgcctagcgcacagtaaatttataataaaaaatatagaataattaatgatgaagaaatgaatggtagatgtagtagaatagaaagatatataggaatcctgagaagtttggcagcacatccaatagaaatgtattgcaaaaagtttatatagtatttacatttcttatagcctcatttaaaaactgagaagaaacaggtgaagtaattttaataatatttatttaactatatgtaaaacaaaaatattatttcttcaacaggtaatcactatatcaattagtattatttattgcattatttattgtaccacctctctaaattccgttgtgaattttacacttccagcaaatctcagcaacacgggatagccactattcaggtgctccaaagccacatgtggctagtggctaccacattacacagcatagctatagaggggtcttagaatattctgactaagtcaggaagggacttttgtcacctccaccaacatcccatgggtcagaacccagttatatggctaaacttaattgcaaaggaaactagaaaatgtaactatagaggaatctttaagaaactattggtcagacaacctaagtgtaatgtgacaggatattatctaaaatcttaatttgaaacaattacatatagttgatataaaatgcataaaatagagaaggatgtactatttttgaagccaggttcaaagtgtatataatgaacactattgaacaaagcaagatttaaaaaaaattgtgaattgaataaaatatgtatagtaaatgtacactctattatgtaaactaaagtatgtttagtataaaaacacccctatactaaaactcctttcaatactccaaagcagtaagaaaaaaaacacaaaatatacatttaccaatcttaatagtctagcttataaactgatatggaattcgttacatgatccctgtttgaacattatgtaagactagcccaggaaatgatatggaaaaaggaatgaaaggtaactttcaacgaagttacatgggagagtgatcaaaagaaaatgtgactttttttccttaactcaacacgtgtacgtgacgcttcaagtatgcaacaatggatctgtgctcaagtcaaatgcacagaccagaaacagaaattggtcagaagacatttcttgttttttcggttttttttttgttttttgtttttgtttttgtttttgtttttgagatggagtctcgctctgtcacccaggctggagtgcagtggcacactcttggctcactgcaacctccgactccctagttcaagcgattctcctgcctcagcctcctgagtagctgggactacaggcacgtgccaccacacccggctaatttttgtatttttagtagaggcggggtttcaccatgttagccaggatggctcaatctcctgacctcgtgatctgcccgcctcagcctcccaaagtgctgagattctgcgttggtcatcaatgtttaaacatgttaaacgtaacatgttacatttaagtaacaatacctacataatcatgtaagtacattcattgccaacttaaaagggagtcttcaaagcagaattgtcagaacttttagcttccctgggccacactgggagaattgtcttgggccacacattaaatacagtaacactaatgatagatgatgagctaaaaaaaataaatctaaaaaatatctcatgatgtttcaagaaagtttacaaatttgtgttgggctgcattcaaagctgtcctgggcctcatgcagcctgtaggctgcgggttggacaagcttgcttcaaagctaacattttttctccaaaattttccctactgctatcgcgatcaatttgtttcctctgaagtgactgattttaactgagatatttttgtttgtttgttttctggttctgcatgtataaatccttcgaatagtgtaaggacactgaatttccagcaacttctgtttcgaaggttcacacttcaaactataacatgttgtgtaattattggaaaagtgtcctaaagcttccattattagcctataaactatagttttggaagagactttgcccaccattttacattactagctgtgagtgcctaacatttagtaagtacccaagaaatatgaatgttagaataaagtcatacatataagaaattctttacattgttcaactactggagaatatgttatatgtagtgattatttttaaaagcattataaaaagcatttcaatttgttcaagcatctcaataagttagttaaaatacacagaaaatgaataaaacaattagaatatatatgtagcatttgtgtgtgtgtgtgtatataaacatatatatgcaaatgtgtgtgtgtgtgtatatatatatataaataggtagagaactttaaagtaattaaaatctgaatgtggttagctcaagtcaggtaaatttgagaaaatctttacaaaagccatttgctcatactactcactctcagattagttgttcatcaggtaaacaatttgctaaataaacatttaaataaaagaaacacattgcataggggaagaaaacataattttacctctaccttgattttttttttttttttttttttttttgacactgggtctcactttgtggcccaggctggagtgtggtaatgcaatcttgtctcactatagcttcaacctcccgggtttgagccatccttccacctcagcctccccggtagcttagctacaggcatgcaccaccatgccgggctaatttattattttttttactttttggagaaatgagggtcttgctatgttgccaaggctggtcttgaatgcttgagctcaagtgatccttcagtctcagcctcccaaagagctgggattacaggtgtgagccaccgcatctagcctctacctttatttcttaactgggactcctataacaaaagagatatcaacaagaaaaaaacaataaagtttactaacatacacacctcatgtatacatgaaagatatataaggaaaaatgaataaatttctctgacaaagaacaatacgttttttgagaagtaacaagacaagggaaaaggaccctgagtctctatgagtggccaatttcaggaaggcaaatatatgggaaactgatggtagataaaggctagttaagaaaatttattatgtagattcctctgatgcagtctccgggctgataaagatctaaagttgtcattggtgatcaaactttgtcctttctgatagagaggagaggatggacacctttgcaaatgtatgtactgttttcaggcaaatagtgggagggcagagaacttatatctgcttcttctgaattgcctttagctcaaaatagtcctgtgtcaaagtggcatattttcatgaacatagagaatggaataatagacattggagacttcaaaaggtgagaggggccgggtgcggtggctcacgcctataaccccagaactttgggaggctgaggcaggcagatcacgaggtcaggagttcgagaccagcctgaccaacatggttaaaccctgtctctactaaaaatacaaaaatcagtcgggcatggtggcgcgtgcctgtaatcccagctattcaggagaccgaggcaggagaattgattgaacccaggaggcggaggttgcagtgagccgagatcgcgccactgcactccagcctgggtgcacagggcgagactccatctcaaaaaaaaaaaaaatggcgggaggctctcatgtaccccagaaatttatacacctacagtgtacccacaaaaattaaaaatacaaaattttttaaaaggtgagattgtggcaggggagtgaggagtgagaaattacctattaggtacaatgtacactattggagtgatggtttcactagaagaccagacatcactactatccaacatatgcatgtaacaaaactacactgtacctcctaaatctataaaaataacaacagaaaaaggcaaatatacatatgctttcttatagattcattaatctgttttatttcagtgaatgaaaacttttgacaatggctaaccttgaaaatatgttattagaacatgtttttctttctccattgtgccctatgagcacaacttgagaaatccagcaataaaatgcaagctagtttttttttttttttgaaacagtcttgctctgtcgcccaaggtggagtgcaatggcactatctcggctcactgcaaccttcacctccagggttcaagcgattctcctgcctcggcctcccaggtagctgggactacaggtgtgtgccaccatgcctggctaattttttatttttggtagaggttttgccatgttggcccggctggtctcgaactcctgacctcaggtgacccgcccgcctctgcctcccaaagtgctgggattacaggcatgagccaccgcggccatcaagcctgctttcttgacatattttgtgacatattttgggatggcatatttcggtctcctacagttggcagggcaatctaaagtactttaatatccttcttcatgatactttcaaaaaatggaatttgatgcctcagaaaacaatactaaaactttcttaaaatattacaatgtgtactatattacttttttaagtaataggacttataaatatttatttttaaaatttgtaaatatttaccatccacctttgattgaacatttttttctcattattttatccaaaaatgtctattgagacctttaaaatttgtattttgtggcaccatctaagacgtgatttatgctccttgtcattatttaatcgtcaaaatgatactttgtctttgcttaaatcagtgtgggtacatcgaacaaggtttgagagctactctgtaggactgagtcattagcctgtaattttacagcggatcaagtactacgttttcattacttggaaagaaaatgaccttgcaattgactcttacatttaacgtttttatctcagctttaccaccattaaatataactgtttgcactgaccacataagaaaccagaaaaatcactgggtcacagtttaatctaattcaatttaaatccgagctagatagctataattggcagtttaccatatcaaaggccagagttaagttacactcaaaattgtgttgatttggaagtaatttgccttaaattttcaagcattgttctgggggtactaaaatgctctttcaagagtttactatatggtacgtaatattttccaagtgttagatgatttatgaagtctacattattatctaaaacaaccaatgttgtaactaccatacaagtctatgaatagaccttatttcacttggcctatctcagggtacaggatcccagccttcttccgtggcaatatgcaggctgttcctcagcaacgatttctagtattgtgtgaaataatcatacttacaatactaacttcttgcttcccaatgccaagaacactcatcttgtttctattgaataaggtgacaggcatgatagaagcagggcagagccaagtcctgacagtaacatttcaagtacagagaaattcatatgagaaaaatggacaatgagggcttgttgtccgtgactttttgttccatgaaaaatatgcctgttagcaaaatcacataactaggaattttagataaagtttctatgtacattatttaaaagagtgctttatacggcatttaagttaaaaagaaagaaaaaacattcacattaaacctaaaagtaactaaaaagtcatagaacagagatgtcatacagatggctagcctttattaagtgtcaagcattgttataatggatttgcatgagttctttaattgcatttatttatcttgttttggtttggtttttgagacaagatctcacttcgtcactcaggttggagtgcagtggagtcattgcggctcattgcagccttgacctccaagccatcctcctacctgaacccccaagtagctgggactacaggtgtcccccaccatgctcagctaatgttcctattttttgtagagatgggggtcccctatgttgcccaggctggtctcagactccatagctcaggtgatctacctgctttagcctctcaaagtgctggcgtgagccacggtgactgaccttatttatttatttttaatgaacaagtaacagttgagtaatttatggtgtacaatgtgatattttaatctatgaatatattacagaaacattcaatcaagctaattaacatatctatcacctcactaacttatgttttgtggtcagaatgttgtctactcttggtgggaatgtaaattagtatggtcattttggaaaataatatggagattcctcaaaaacctaaaaatggaattaccatatgatccaactttcctacttctggatatatatccaaaggtattttaattgatttgtcaaagatatatgtgcactctcagttaattcttaaagcaacgtactgagatagacattattagtatcctcattttacatatgacagaaccaaagcagagaatagttaaataacttgttcaaggctaaacggagaaagaatcaggattctttttaatattttcaagattcccaagttcaaatgattaaacaatctattttttttttttttttaaattgggggcttccaccttttttatatttgttgttagtgggatttaggacatatcatccccaaatatggcaccttggcatttcgggaaacagcggaagtgagaaagtctctgaccttctgccaccattttcctctgaagcagatcagaaaagaattatctggccttgctctgaagtaggccataagacccctcatgtgtcccatacctaaaggaaaggaatgtcacactgggacacagagaagactgaacaaacaggctttgctacattcccccccaccccaactttattaccattagattacacccttttgttctccaatcatacttctgccaggttgtccactcttcatcaaatttagcataaaaatacacaggtctcccctttttctttaggtattcatttctgaatgctcctgtgtcctggtatcatttgtaaaatttatattaaatacatttgtatgcttttctcttgttaacctttcttttgctataggggtctcagctatgaaccttgtgataggcgaggaaatcaattttttctcccctacattgttcacaatccaatttaagagaaaaagtgagcactcttgatgatccagtaccccccaaaacacacagacacatgcagaaataaaacaaaagttttataaaaggtggcatttttagtatatgtagccacactttaataattttatttcattcttttctatttgtttttttttttcctttttttgagatggagtctctgttgctcaggctggagtgcagtggcatgatatcagctcactgcaacctctgcctcctgggttcaagcaattctcctgccacagcctcccaagtagctgggactacaggcacacaccaccatgcctggctaattattgtattttagtagagacggggtttcaccgtgttgcccaggctggtcttgaactcctgaggtcaggcagtccgcccgcctcagcctcccaaagtgctaggattacaggcatgagcgaccgcaccagccttctatttgattttttacattaatggcagttatgacacataaacgggttgtacagctcacaaatgtcttgacctatagcttgaagagcatttgtctaaatgacttgctcaaactacttactcacaaatccgggttctaaagttaggttttttggtttaaaaactgtaggctttttcctcttggttttataattgtgtcagtccaaaaattcttcatttcctaacttttctccatattagctataaatcagaatagttgggaactaaatgggagctttgccaaaggggcaatccccaactacaatgcgttggtctaatattcagtaaaatacattgattttagtaaaattcactgcatattttgcattttactcaaattcaatataaaatagacagtttttttttttttttttttttgagacagagcttggcttttgttgcccaggctggagtgcaatggcgtggtcttggctcactgcaacctctgcctcctgggttcaagcgattgtccttcctcagcctcccaagtagttgggattacaggcacctgccaccatgcccagctaatttttgtattttagtagagacggggtttcaccatgttgaccaggctggtcttgaactcatgacctcaggtgatccgcccccatcggcctcccaaaatactgagattaccccacctggccaacagtctgttcttaaagaaagaaaattaaaataaatataattactagattcagtgtacattttacttttgtgagtatcattcaggaattcttacctcagaaaacctggaaaaggcaagttatttagaaatatgaagaaatcagggtgttttattcttaatgaaagcatgcatcttaatttatctttagaaatgactgggggaagttgattatacaatcaaaatgattaaaattaggcatgtagactttagtgcaagcaaatctgggccactcatttccaggtacatgaggaaatgtactagcacttcttttattactatagctttgaaggcagcgtgttgtcttacttcccattgtttggatttttaaactgataattaaattcatttgcatcactgctgcttggattacaaatacttaaaacaattagttttctgtcagatcacagatctacatcaaatagatgttactttttaaagaataagccctcaccaattagaatgattcaaaagcttttgattgttttctccaaattgttaagtatgcatttgtctttaatgtaaataaatagacttaatggcataaaaagccattctgaattttaaatgaatgacaaaatgtaaatcatgttctggcataatagttttgccaaagtttcaagaaaagaaataggagcattcacaataagcaattgcaagctgtgaaatggcatattaaaacagaggattaagttatttttctagttagtttttggggaaaaaatctccagtcttgcagaaatggctaaataattgcatttggtatggaggctacttttggtcaaaattatgttaataaatatctgagttcctcacattaaagtgaagcaagaatctgtggcatttttttaagtcataaaacatttgtatgttggcttttagatagtaacaagatggcatccatttatctgtatgcttctgcgcatacaaccttatatgacatatgtaccaataaaaaaagtatacatgtattagtaattaaattctagacttgtgctgtccaatttggtagccattagacaatggcaaaaaattattttgaatttaaattagtgaaagtaaaagaaactatgttgttcctccattttgctagctacatttgaagtgctcagtagtcacatggttttagtggccatcgtgttatgtagtgcatgtatagaacattttttgttttttatcaccaccaaaaattctaatggacaatgctggtttagctcttcagtattgcaaactttagcctttaaaagctatttgcaattatttagcgtgtattgtttatgctccaaaatactttcatctcaatgtagaaagaaaacgattgcacttttgaatataagagaaatcaaatccttgatttttttctacataaaaacgtggaatttaaactgaattatttaacaaaaatcaaagtaccttagaaataacctgaaaagaaaaacaaattttagataatatatataattttgaagtagaagaaaactaagataaaacgtactgcatttgtatacttttatagttttctaattattattataattggaaaaaatgaattttaacaaattaggtataattatcactgtggtaagcagtctccagaatggtcccaaattaaggttgtctgattacggaataccatgttcttttaagtccagtaatcccaaccttttctaggataaagcttggtatatggaatcaagatatgtattcttgttattcttctgttaccattactgctgtgggtttcaagaacaggcacatacagtttctccttgtgtgacacaaaccttgtgtgaatactttttggtacgctttcaaactggggcagcactagatgaatgccttttccctaggtatgcctttcagtaaactctccaggtgagaggggtgtagtaagtactgctttacatggatctaagtgacatgatttgatcacagttcaggtggttgtagttatgaaccatttcatgttaaattaaggtttaggggtttattttctaaaataatgctacttacagtgacagcatagcatagaatctacaagttctaaagcaactcaataacttctcttaaatggcccttattattttggattagcattttggatgacaactaactccactccctctcttgaagggaaagagatttggtagaaataattgaatgaatcctggattaatctagaatatgattttatcaatgactgatgaattacactgcactcagttgataacggtgtcttcttctcttagaaatgttgagtttgttcctattattatttcaggagacaaagctttttaaaagagttggtcaactgtagctaggcatgaaagcatggtctctaagaagacacttataattccctaagtatttgattaaaaggaaaacaagtacctcaaaaactcttaagtttatgttataggcaaagaagtccccaaacaatttagtcaacactctgaaataaactcttaagagtggtgattttcacttggcattttggagattccatgtgtggcaatgtgctcctcaatcaaggagttacatttctatgtgcagtaacattgcagttgcacaattaatacaaaaacaaacatatattaatcaatgacaggttttctcattttcatacagagttatgaaacctttaggctaaggaacagaatagtgagaaattagacaactattaataataggattaattagattctggccctacagctaagaaaatggagtgacaatcagaataacaccaaagttttgcaagttgtccaagtgacaaaatacaactaattaatactaataaactaaagtcaaattggactctatttacacaaagtactttttatatacaggcaaaaatttaagtagaaaaattatggcctcccagaactaataccaaaaatttaatggtaagaaaatgaacgtattcatttaatatataaccacatcatttgaaaatattgagctctcattgtaaagacatgacattttctctaaaattaatatattccataaaaatagtttttaaaagagaaaggctttgtcttcattcttttcgtgtgaaggtcaaatatcttagattggaatttaactgcaggaattatgcttctgttcttactttagcaacactaacgatgacattttctgaagtacatattgttaacaccatcatgatgaaagcaaatcatttttctacacttactttgatgctaatcagagcagtcatttaagttgctacatgactctgagacagaaatttcaaaatgaaattgaccaccgattcccagacaaaaccagaatagtggtgtcagatgagaagggttttgcagtgttttgtcacatttcattttgatttttacttttttctctgtttgacatatgttctgaactagagtgccataaagttttatcaccataagtttgaaatgaccacattactcatgagctacagagtcacaagtgagtttttagcttctttcaaagctgtagaaataaaactttatagtaccctaccctggtatatgttgttttatgtgacacattttgttccactttattcttttcttttatttcccttcattattttctttttgaattatagcagaatttgtattaaatttttcctaatacacaacagtttaagctacattttataatatcttatgtatttttttcatacagattatctttgacctgtaatgcccatctcttaaagaaattttagatggtcattataaacaaggttcattgtgaaatatatttctgttgaaacactgattttattacaaaaaggtaatgtttgatttccatgagaaccaaaactattggttgagatatgaaagatgaacatttgcttccctttacacaattgattaaaattcttaatgcatacatagtcacactacacaattagtgtagtacatacatatccgtataacttgagtcttccatgtatatgttatgcaatagaacttctacaaagacatcaatatctcatgctgaaactatccaaactataaaatgattttaggattagcttatcccaaagggaaattgtgagcaatgtggctggcctgacagcctgaagtgatatgctcagagtggatctgataggcagccattcatttcaagctcaggaagcaaacttattattttgtcatacacggtcgtttttccattgaagacattaagacggtaaagaaagtcctcagagtctatggaaaggatcaccagactttcattttatctccagatcttgaactggagcttttgaagattccattttagtgatttctggaaggctgctaatcttaatgaataaagtcagaaacacatgtgtgtggctgattcagattccagaaagaattttggttgctatcatgattatttttaaggcataagtgattaacgctgagatatactgcttttcctatttgtggattaaatttcttctatcggagaagttctaattgaaatgtctccattcaatgtggttgtgcacacacacaagtacacccatgaatgatattttacatatgtaaaaaaagaaaaccgatattaagtaacttctacttttcattatgagacatgctgtgtgtgattttatatatatatatacacatatatatgtatatatgattttcctgtgttttgttaatcattttttatcattttataatttttaccattttcatcattttttattgtgtggctgatatatactagatattactcactcagggaggatacaccctcatctgggcactcttttatacaagttatggcttttgttttaaataattcatctaagtttaatgaaagaaataagtgactgctttatcctagagaagcagcaaagagattttgttcacctgtgcctttagagactacatgacagcctctacaagtagcagggtagaatcaggttgattataaaagccttcatttcatgctaaatggaaaggagaaaagaaagaattttctcctttaattagaatgtggcagtttaatgacagaggcactattgttgtgggttaacatggaatgaaatcaattaaataggactatgtatacttaggtgtctgtaggaatcaccaaaaatgtaactctccaacagtttgctgaatctgcctctgttttgtctggctgctatacttggtatgtgggccatctggctcctggattccagtaaggtttgcatattcacacatcaatcagaagtggtgtagggcctattaggaagcaccagccagttaggtgacatgccaggactgcaaagcactcaagcaggaatgccaagtggggagcttctgctgaagctgacgctgacacgggcattggaggcaccttttgatccgtctagctttactgttgatgtcacagtcctgctagatcaggcatagggatgtcaggtcacgtaaggcctcatttatgtcattggttttgcctggataattcaaatggagcaaaaataaaagtgatcttgatccttaggtcccatgacttttgatagtagaaggatcattgatctgaaattgtcttgcattcctgactagtagacagaaagatatcagaagcaactttgtctattctgtttctagaactatattgtgggtactagtttttcacagtagtactagacatttcagaaacagctaccgaataatctttccaaataaagggaaaggttgtaataaaatgcattcccattccctatgtcttctcaaacagttcactgaaacttaaagggatgagcacactttacaagaaatgcaaataaccttttagttcactgaaataagataaacaacacatgtgtgtatttttaattggaagctctatcattcagttccttgaactaacagctactatacttttcttttgatgtatgcttcacagatatccattgcaagttttagattgtttgcttcaatgtagataagacaaattaactgaaaacttaaaaagcacctagaggattggttattttaatgttttttagacctctggatgctttgatcccatacagaataggatgaaattccactataatggcattgttttaaaatttgaattggccgtaatgtgttgtgtgtgcacacatttatctagctatgaacacaattaatactcactgagagagctctttaaaatgatgacataatttttttctttgaaaagttatttcttacgccctaaatttctaaagtcaccaaaaaaaggtaattttctatatgtaagacttatttatagtaactaaatttctaagtaactgatatctcctaaacagaaatgtctaataacttacttctagatcagctttaacaatggttttgatttatctaacttagtgcagtaatacaaatattagtagtaaaataatacaagtttaactaacttggtataataataggaataatataattgctcatgtttgatgtatgctaactacttggcaccattaagtacatcacatgtattatttcacttttctcattaaaatagcagtgtgatgctattatctccattttacagagagggaaagtgaggcatggagagaagtcgcaatttagaaaagtaataagtataatacttattttaattttaaattattctttgctagaggaaagatgcatgttccttggacatcttctatactttaataatattatttctatgtttctagcaacccccacaatgaaaagcaaatacacgatgcctttgggggacaaagcagttctgtagtcaggcccacacatgaagtgttttacctttataggtttcaacaattaattggaataagctattttttctgttttggcatctgtctacttggcaaggcccccaactgtggtgttggcagctgcatgacagcgactgcctctggtttttccacagcaactggctgaaactcgcctccctgggctgtcctattatgttgaaaattattttctttgactcaaatcagaagagtgtaatagaaattgtgaaaattcctgacatcttcccaaagatgtttttgaaataggttaaggttctccgggagtaaacttggattctaaatatgattttttttttctgacagatgtatgcatgtgttatggtaggtattcagaaatgaatgctctcatttgtaaaataaaataaaataatcccaaactcttaactatagcaatttgtggttttaatcgttttcccttgtaaatggaaacttggtaagttttagagtgcattgtacatgataaaatacatcttatgtctaaaatcttagaaaatattatcttgcattggggaaaacatcataatagtgcatatgtgattcattttatgtaaagtcctaaaattatctaaattaaaatatctatattctatagctgtgcatgtgtgtatgcacacacaagaatatacacatctgcattttatatagatacaagtatattgaaaggatgatacattcttatacagatgtagagcttaggatttctttatcaatataagatagaaactgcgaaagcatgaaaatgaaattaagcatacttcctttattcacttatcacccgttttcagaattagttgccctatgggtaggtaccttttaaattatattgtacatctttcaattaaatatcgggaggttgaaaattaagtgacaattctaatatttctagtggaagacctgaagctgcactattaaaaagctagtaaatggaaggggaaggatatttctttatccatggagttaattacacaagcagtacactatgtaagtgctaggagaaaaggtgatacaaacactacttaaaaggtttccagcgagaagcagctctgaacaaagtagatttaaagtgttacctccttactcctacaaattctaatgggaatcaattatgttccatgagtaataataataattaatatttatggaagtgcttactatatgcttggctctgaaataagggcttcacatattatagcacataactatcctaagtagaagatactatttttacttccctttttatagatagggaaagtaaaacacagaggtgggccgggcacggtggctcactcctacaatcccagcactttgggcggccaaagcgggtggatcacctgaggtcaagagtttgagaccagcctggccaacatgacaaaaccctgtctctactaaaaatacaaaaattagccgggtgtggtggtgggtgcctgtaatcccagctacttgggaggctgaggcaggagaatcgcttgaacctgggaggcggaagttgcagtgagccgagatggcgccattgcgctccagcctggggaacaggaaggaaactccatctcaaataagtaaataaataaatagcacagaggttaaataactctcctacactcacacactccatgtgtctctggtgatcacttggtaccacttcttttcttgcatgtctcacctctcttataaacacattaccaattttaaatgggtgttatgaactatgtgtattaattatggctgagaaccaccatttttaataacatggaattttctttagctggcagggaaggaatgcttccagtttaaaaaaaacggtaaaggacatagctttaaacagaaaagacgctttgaagataagttcatgtccataaagtccattcaaataacttagtaaattgctgataaggtcatatcatgtagcattttttaaaaataagattgctgaaagttcagcttgctctgagtaaacacagagcaagatgattctcaattatatagtgaataaaatcaataagaacatctagtgaaatccaaacagaaaataaaaaaatcaaaattgacttttaaaaaaattgacattttatggagataattgtagatacatatacagttaataagaaataatacggatatcctatgtacactttaccattttttccctaaagttaatattttgcaaaactataatataatatcacagccagaatattgacattactacaattcagcaattttattcagtttctctcggtgttcctatatgtgtgtgtgtgtgtgtgtgtgtgtgtgtgtgtgtgtgtgtgtgtgtatttagttctgtacagtttcatcacatgtgcaggtgtaggggaattggatatcacctccaatcccccttttagttcttagtaggctcttcagttggatctagaaaccaaatcgacatcaggcagaaaacaaaagaaaagaatacaaattgtattacttatacatgtacgtggagatcatcacaagaaagtgaagcctgaagaagtagtcaaagcaagatgcttttaatgatgaatgatgaatttgatgaatttggaaagcaatgacaggataaagagaatctggctagggacagtaaattttctctaggggagtcactaggagatagatagtgggtataaaactagtgaaagataagggttacttcagtaaatatatttattcaggtccattgaagcctccaattctaagtctctggtaataagggctattttctcactctggtcctgtgagggtgcccctcccagaggaatctttatggtttgctgcatgtaggaagagacaggtgagctaactctttctgaaactacaatttctccaaagtttccaactgaaaatagccaacataccaatctggcatatttggggatggaacatcctttactccttcacaggtatctgtggatgagagctgaagcaggcccaccaggaacagagagtgtttccccttactgttggcaattctctggattgcatctacccatcctgtcctagaaagtgtcaggagaacctgatgttgtctcagggaatcctcttagatgtggagagataagcctttctaggctgctttcgactgctggttgtgggtctcgaaatggtgagtctgggtcacttgcttctattaagtgaaaagatgtaagtcactcaacttctgctccagacccagtaaaccaaaactccgtcgtcttcttctgactaccttcagagttatcttgggtttattcctgcattattaccagcatttgttgctgttttagtgggaagaggaagggaaaaatgggtcgaagttatcttacccttaccagaagttcctaaatagactttttcatgagaaagaatatttttaaaaaactgtttatattataaatattcttggtagtttttttgctgttacatattttttaaaaatccatagtgcagatataataaaaactattgcaggtatttaaattaacagaactagttgaattcctacaacgtgtcatgtacagtgctaggttggttgatctgtctgtgcttctgctttacttggaatggatgagcaaaggcttatactaatttgcacttagtattataatgaggtgtgagaaaccaattttcatattcaagtgtctataaaaagtgactatttttcaacagttagctcctttaattataaaatcagtttttattaaaggcagttgatgctttgtgtgttgttgctagggtgacatatattatagaaacatacagtttatctttccagtaagagggaatacagtctctatcttaccgttaatactttaattagagaatgatcgacagaaaaatcttttttctcttcatgagatttgaaaaatgcatatcttctttatctgcatttaatcaaccctgggttcattaggatttgttgtgttggcacctgagaacatcttagaaattattaaataattcattttctgctttttttctttattttttatttccagcagaggcttgtattaaggagattctcttttgacatacccccacatacattcacactaatatatatgcactattttcaactgacatgttttagagttattgagatattaattttataggatactatcacattttatagctcttagtaaatagtatggtatttcaaaacataatttagttatagtaatagaaataatccatcatatttgttgtatttataaaatgtcttcaaaaatatcatataaatgatatctgaaattttgtcctagtcttgcaaatgctaggggattaatattaataaggttgttgtcaatataaatttctagtgagatgctcattaactggaaatccagtgctagagagacatttcagaatacctaaaccttatttagagacaaataaacatactagttaatatggctattgctatgaaccgcataaaattgaaatttgcccgaactcattcagctaagcatgctaacctcggctttggaaaagattgaatggcctatcatcagtcaatcttggtactagagttaaaagaagaggcaagtaatatggacagcacaaggaaaatgacagaaatagcggcttgtgatgataattagcaagaagtttgaataagcaaactctaaagaatattgaaaatgagacaaaaactgttaatgtatatgcaattaaatctttggaccctccttgcttgttgtttcaaatatccaattgtggagagaactacgctagggtaataatattgcccgttttccctgtccctccatgtactccaattaagaaagcagaaatgaaccatctaccctgatttttggaggaggaattgagtaggtatggcttcatgctctttaaattggggttaagcccccatgatataaattatatagggaatgcttcttcttccatttaatgcttactaatggatgtcactaggcaaattattagcaaacatacataataagaagacttaatgctatgttcgctgataacagctttatcattagtaaaggagatattttcatctctattcgtctgactcctatatgtgcggcttaattgattacgaacctaggtggggaatagatttaataattttctcaaactccatctataagtaatatgaagacatgataaatttttaagcagaaaaatgaaatgaaaaatattatgattcggaaaatttgtttccttgtactatgaaggatacttgggagcaggttggagaagagggtgaaggaaccgtttgggggacgcgtcagtaaaactggtggtagagactaggctgaaggatgatagtgggaatggaaaagtgaagacatttgaagggaagaagacattgtgtcggagttctaacgatgttcatttgtgcataaaacttgcatttgtctatcttattgtactttatatattcttcctaataccctgtactccattttactcctttttttttttttttttttttttttgagacagagtctggctctgtcgcccaagcaggagtggtgcagtggcgcgatctcggttcactgcaacctccgcctcctgggttcaagcattcctcgcgcctcagcctcccgagtagctgggattacaggcgcctgctactacaccagcctaatttttctgtttttagtagagacggagtttcaccacgttggccaggctggtctcaaactcctgacctcaagtgatctgcccgcctcggcctcccaaagtgctgggattacaggcgtgaaccacctcgcctggcccctgtaccccattttcaatatggcaaatggaataaatgtttttacaacatttatttgactgttgtttataactcttcaatagctgtccattactgtaaagtttatgccacaacctatagggctctaccttttaacagctatctctttctgattttccacttctctccaacctccctccctaaattacggtgatactgattttcttttaaaatacaggactactatcagcctcctttttcatcttttaggccacaacttaatgtttcttcctcagagaaatttctaaaggacccaaacccacaatagcttctatatgagactacttctcccattatatatcttccaggtatcctgtaatctcctttacaacagccagcagaattgaagtacactatttgtcaaccaaaggtgtgaagcttcttcttactcctggtgtttgtggttttattgactcttctttgttttctttaccagtgagatcccatctacatctttcagtattttcaccagtatcttggtcttttgcttgcttgctttcttgttttctaggttgattataattttattcctctaaacacatgaataccttccgtcattccaatggaattttggacaaaagggaaaaagttataagtgccaatttggttgccatgaaccaaaacagaaaattaaatacaattgcctagataatcaggcccaatttgtattacctagtatgaaaaacactttggtaacaacagtaggtcatgttaaactaattaatttctaggaacattgataaattaaacattggttactctccagagtaactctaagcccagaaaataagtgacttgtacatccatcatctgattcaggttcaaagagagtttctttattttggcaaagccaactttactgaaatgagatgagaagatttctgttgccaatttataatggagattaaaaataagaccccattgtcagagttggagatcatatgttggtaattgtggttttgtacaaaattaagaattgatccctaagaacttgtaaattataaagactttgtttagctcagtcacatttgcctaatctaagatttctgtctaggagaaataattttctagatggagtcaactagtacacctagtttaagtcttctttatgtgagattgtgtttaaaacagtgactcttttggccatagttacaatgagttcttcaagggttgtgtatttgcagactatcagtggaaagcacttgaatggcaatagttggaaattttgaagcaaaggaaataaaattgttacttgaaaccttgtaaaaagatcatacggccgggcgcagtgtctcatgcctgtaatcccagcactttgggaggcccagacaggtggatcatttgaggtcaggagttggagaccaacctggccaacatggtgaaacccgtctctactaaaaatataaaaattagttcagtgtaatggcgcacgcctgtaatcccagctactcaggaggctgaggtgggggaatcacttgagcctgggaggcggaggttgcatcgagccgagattgcaccactgcactccaatctgggtgagagagtgagaccctgtctcaaaaaaaaagataaatttttaaaaatccatgcaaagagcttgctattttgctattttagggagggagcatgagcttcatactcacttggaatttcctgagataaaggcagaaatagaattggaaaatatttaatataaatctgaaaagataaggcatttctcttagaagaagtttctaagcaaggcagctatatagcaaagggtgaggtatatatccctggctgcctcttagcacagggaactggcaccacggggcctacactggcccaagagttcttcaaagataattgtgttcccacaacttttctctgtgtagtaaactcttcctgccctgtagcagtccgcccagttcatgaaaaccatgggatttgacccactgaagaagacttttctcttaaagtttttcctgtttatccaggttttacccagtaaaggtcagctataactggtaatagttttgtcaatgtttccataccttgggacaaagttccttatttgctcggtatttcctctcaagttttacttggcattttgaaatttgaaaaaaattctatgtttttcctggctgtgaaaatgtattttttctttagtatttgatattcaatttataaaataagacttaaagcagctagatatttgcccatcgttatgtttagtggaatgaagaactaatcagctactactagtcttgttccaattaacattctattcctccatttccttcccacactgatatatgtacatatatagatatcagtgtgatatatatatatatcacacatacatatgctcatatatacatatatatcttatataagtctttgacctttctaagggtcaaacaccatgtttttcacaatctaggcaagctgctacaaggaaggaagagtctattatacacagaaaagctgcaggagcacaattatctttgacaatacaccttatattggtattttattttttttctgaaattactctgggttgagtcttatatttagtttctaattgtgaaggaaagccctgtaatgacctggtgatccatcttctttagaaccaagtcggccacagtcctaaaataaacatctgaaggcataggaacatttacagatgaaaatcataatttaatcaattgggtgtattatcttattttctaaatatgtatacattatttctttttttcttttttgtgagatggagtcttgctctgtcactcaggctggagtgcagtggcatgatctcggctcaatgcaacctccgcctcctgggttcaagcgattctcctgtctcaacctcctgagcagctgggactataggggtgtgccaccatgcccggttaatttttgtatttttattgtaacagtggagatggggttttgccacgttggccaggctggtctcaaactcctgacctcaagcgatccgccccaccttggactcccaatgtgttgggattacaggtgtgagccaccacgccaggctaccgtgtttcttttaaaaactttttttcttctatgtaccgtataggttttaaccctgtaagactgaacaccctcttttgtaagacatattttgtaatactcccattactatcctcaaagagaatttaccaaaaatgtaacttacatatatatataaaattctaaaacaattaccttgtaaaaaataaatcaaaggacaataatgaattaaaaataatggatatatttatcatcaataattaattattcaatatgaaaataagaaaggtacatactgctctagataaatgtagtacctgtacctaaaaccacagaagtagacagctcgaaatgctgacgtatgcaggtgagtggtatgaatgattaaaatgccatgaacagcatattttaaagtaatgggatttttctgtatgattaataacatttggtaaagttctgaataaaataagtgcacattttccctttgatttattgtgggatagtttcattcttggaaaatgcagtgcatataaagactttgtatttatatgtaaaattgagctaggttctatatattcacatacttataaacaggctgtcccctacttttcaaaagctgaataggacatgaaacaattactcattttcctggactttcctgcgtgttactggatgtctggcgtccttagagcacctttccatccgttatggggacaatcacagtgctttcacgtttcttaaatgtacccagggtatggtggtgtgcccagttgagaggaactgcaagtgagggttgtatttttttttttttgagacgagtctcgttctattaccaaagctggagtgcagaggcgcgatctcaattcactgcaacctccgcctcccagcttcaagcgattctcctgcctcagcctcccgagtagctgggattacaggcttgcgccaccacacccagctaatttttgtatttttagtagagatggggtttcaccatgttggccagactggtcacaaacttctgacctcaaatgatccacctacctcggcctcccaaagtgctaggattacaagcatgagccaccgtgccaggccagggattgcatttttgcatcgaagtagcagaaactagaaccagaggattttaactttctcatatgatggaatctgaaggaatggagtctaaagcaagaaactggccctgtgatggcatgaaaatcccaggcccctttgatcttcttgctcttttacaccttactatcattctcatgcttgtcaactcttggttgcaagatgatggtttcaacatctccagcctcaagtcttacatttcagagcagaaagatgaaaaaggaagcaagaagaaggaagaggcagcatgtacatcaggaaaacaaaactatcccagaaatccctagctgtcgtcctctcagatgccaaaaggccatgactgggtgccagagatgcttgaaatagagctctttgttcttgcttgacaccttgctacttctaaacaaaatcacgattttgttgttgagagaaaaaggactcctccctatctacttgtcctgagactgcttcagcctctcagcttcctagaccctcatgcagttgatttccaattcttccaggagctggcttactgtctactttttcagggtttcaaaaaaaaaaaaaaaaaaaaaaagcattttttaaagtttaaaaagcaaaatgtggagtgaatattttttggttactatgctttttaaatttttagaatttgtttttactgtgggttggctgttaatagtccatcaagacaactatttctttgctgggtttattggatattgggcaagcaaacaagcaaatagcagtatctgccactggatgtaatcaggaagaaattttcagaaaaaaaaaatgatgcttcaaggtctagataagcagattttccactggttcctgattattctaaataaaatgtttagtcagtggttgtgtaagtttcaaggatgttatagatggctcttgaaaacaataacacattaacctaatattttcagtactcctttttctagcttcatttatcctctcccatgcctgtaaacatgttactttgttaaccaaataaagtcattaatacatgagaccattttgccaaaagtaaacttaaaattaggaggaattggtctttcagaaggcaagaagagaccaagatgaaaggaagtcatttttgtgaaccatatgttttgacccagaagaactatttcacagcctttctcctggtagcaaacaatgagggaaacagtttcttaccatctgcacaataaaacttgttgaatcactcgggaattgggattattgctactgtttgtttgttgttaagccttaaatttaaaaaaagacaggatatataagcagggttggttctaatactgaaataaaacaaaaatgaacaaacccagagaaatctgcttccaaaaagccacagcacaacaaaaagaggtgtaaacatcagaagacctcaagggaaaaatacgtttatttagaaatgggatatcctggggattttgttacagcagctttattaagatattattcacatactgtaaaattcactctctagaagtgtacaattcagtgttttttcagtatgttcacagagctatgcaactatcatcactatctagttgcagaatactttcatcatccccaaaagaaactgtatgcccattagcagtcactccccattcctctctccctctagcctctggcaaccgctactctgtgttgtgtctctatagatctgcctattttggacatttcatataaatggaatcatactatatgtggcctctagtgtctgtaatctttcattttgcataatgtttttaaggtccattcatattgtagaatgtatcagtctttcattccttttatttgctaaataaaatttcattgtatggatataccaaattttgtttgtccatttatcaccagtttacgggtattcgtaaggcttttttttcccactttttgcttccagtagactttttgtatgtcacaaatggccatatgtttctttatcccataatcagaataaaaattatcattcttttagtggacgtgcctttttttaatcaaggcacagaaataaaaaagtgagttgtattttctcattaagaaaacattttggggtgtgcatgttttcagttgtttggaaatatgtagacatattggcagggtatcccacttacttttgctgtgtataaaatcaccctgatacttagcagtttaaaacaattactttattatgccgtggatgctgtgagtaataaattcagataggacacagcagggatgttctgtttatgctctgcaatatctatagcctcatctgtcaagacttgaaagctaagttggactcaatggctggagggtggaattctgaaggcctacatgtgaacttgctatgttgtttggcttcttcctagcatggtggctttacgatactcacacattttctatggtaactcagggttccaagcaaacgctgttctagcaaacaaggtagtagtcatatggtcttttatgaccctgccatggagggcacaaaacattactcttgccatcctctatctgttgaagtagttacaaactcacccagattgaagaggaaaggacatagaccctacctttccatttgccaatgagttttgggaccatattttaaaaccattgtgccataaagggcatgttttatgacaggtgaagctttacgtcttaaaagtatataattacaaatgattaaatttaaaatcacgagaataaaccattgcattcatctaccatcttgccactaaatcagaatcagtaaaacaaggtcaaattgactagaagccacatatagttgacatttggaagaatttgacagaaatatggctcaattggagttactgaatttaaaccaaaacgtttggcaccaagaatcatgggagcccagactaaagaggaaacatacattatatagctcttattatctaatggtgaaaatcctatcaaatctccacaaaggtggtgaactctggtcttccatggcatcctagacaaactttatttacaggcatgtatggtatataaaataggcatagataataaatataataatccagaacaatgataaaacagctactatgtcaaggtaccatcctaacctcacttataatcaggcattaaattctcataagaatcctatgaattagacaccattattatccatatttaacatatggaaagaaactaaagtacggagatgctaatgaacttacccatcgtcccactaataaatgttaaagtcaggatttgaacctagatgctcaggctccaaagcctatgctcaaaactcttgctatgtgaatactggcatattactgaataaaatagccccagttttgtttttaaataaaaaatgttgatcaatttttttcaataaaatattgtttcatcacaataagacctacttattttcctcctgagcagtttttagtgacatcaataacaatttttttaggctgggcacagtggctcatgcctgtaatcccagcactttaggaggccaaggtgggcagatcacttgagctcaggagtttgaggcaagccagggtaacatggcaaaacctcacctctataaaaaaaatacaaaaattaacagagcgtcgtggtgcatgcctgtattcccagctacttgggaggctgaggtaggaggatctcttgagcccgggaggtcaaggctgcagtgagccatcattgcaccatcgcactccagcctgggctacagagcaagaccctatcttaaaaaaaaccaaaaaaattataagcgagtcatacaagttcttcacagcttttcattatggtaaaccttgattaaaagccaaggttataaatgtaatttttgctaagtgcggatgtattgtatctgtagcaaactgtaattcaggcccctgaatgtaacatcctagctctcattccttttgctgtcagatttccctatagataacgtctacatctgctaccttatctactcgcaaatatttatgattttcttccatgaaatttacttttctcccctgaacctgtaagccaaatcaagtgaccttttgtgaatctcaaacctctgtgaattttaggtagatttaatattcttggccaccactttctattcagtcaaattcaagaattctataaagttaaatatatatggatgtgtgcacacatatatatatatgtgtgtgtctctaggtcatgaatcttttaatactatagaacatagaacatagaaaattataagagaaattaaaatatattgtcaatttaaaagcataccgaaaacatgttatatgagaatggaataatacaaattattggtatggggagaagaatcatgaatagtttcatgaggaatgtggcatgtgtaacaggcattaaatatgattaagaactaacactgagtatatacaagttagctgtatcaataaaaatgtaaatcattcagcaataaactataaagttatttttactccataagggtttttttccctgaaattttcggcccaaagtgactgttttttcttcacatgccacttatatagtgtgaccaagtatttagttaaaaaaattattctccagtcaaatcatttgttgtacacttcttggagctgtggcttgcttgtgtttttattgattaaaaaatacagcacaatcttgcacctaataaaaacctaacaaactggctgagtgcggtggctcacgcttgtaatcccagcactttgggaggccaaggcaagcggatgactggaagtcaagagttcaagaccagcctggccaacatggtgaaaccccatctctactaaaaatacaaaaattagcctgacctggtggcaggcatctgtaatcccagctactcaggaggctgaggcaggagaatcacttgaacccgggaggcagaggttgccatgagccgaaattgcgccactgcactccagcctgggcaacaagagtgaacctctgtctcaaaaaggaaaaaacaacaacaataacagaagaaacccagtaaataataggaaaaaagtgaatatagaaaagtaatagaaaatggttgcctttgtgaggttagatgtaaccaaaatattttagcaattgtttagaacaaatagattaaatgaaaaatatttccattaatattttaaactgttaaattctgtctaatttcacatggtagatacacattcattaagacttttcagtgttaagactaaataaagaaaaagaaaattcttcttattgtgccttattcagaatccactgaatttcgttattatttttattatcattatcattatcattatcagtattatttgagatggagtctcgctctgtcacccaggctggagtgcagtggcgccatcttggctcactgcaacctccgcctcccgggttcaagcgattctcctgcctcagcctcctggggagctaggattacaggtgtgcgccaccatgtccagctaatttttgtatttttagtatcttatttttgtgggtacacaatagatatatatatttatggggtacatgagatgttttgatacagacatgcaatgtgaaataatcacatcatggagaatgggatatacacccctcaagcatttatccttcatgttacaagcaatccaattacactcttttagttatttttaaatttacaattaagttattattgactatacttaccctgttgtgctatcaaataggtcttattctttagcaaagcatatttgtaaagagtttggagtttctctttgctttacacactgtaaaaaaaaatgtcaaacaaggttatccaaagagtagtaggagaatgagcattgagatcataagtgtctcatctgatcaaagttattcaagaatgaatgcattttggaggcaagagttgaggaccatcgccatcattgactatggagtaacacaagcccagactcttgagattaatttggcattatctttcaaaattaaaagtataattacatatttacatagcaattctacttcaaggagtttgcccttcatttatgttttcacatgagtaagggtttagatggacatgggttttctttgtagctaggtaatagtaaaataggtaatctaaatggacatagcttggtggtagtccatgcctgtgccctttatactacagttttaaacaagagatgaatttatataaacagatgttgaaatgtgatcgttatgtagtattaattgcacaaaagtagaacatatatatgtgcatatgtatgcatacatacatgtacatacatatgtgcatatgtgttctagtttattatatatatgtcaaattgttctatttgtatgaaaacactataaatacatacataataaataaacaaatatgcgtttgtgccaaaaagcacagaacatttctgtttagtctcataccactcattttatagctttatagataggaagaaggtagactttgatggtacttgaatttttatctatgtatctgggcaagtattttatctatgtatgtggtagcatattttatctatgtatgtggtacatacatgttttatgtatatgtatgtatacatgcatatatgtatgtataaaatacatacatattttatctatgtatgtggtagcacgtgagagaatttttgttaatttatatgttatttcacttcaaaaattgataaactgtgtgtgtgtacatatatgggtggtggctatatacatatagatattatatttctgggtggtttataaagagcagaaatgtgttgctcctagttctagaggctggtgagtccaaaagtcaccagcatgttaggtgtcttgtgagcccgcttcctcagtgacgttcatcttgttgatgattcctcacatggtggaggggaaagggagcgttctaggttctttttttttttttttttttttttttttttgagacagaatctcattctgtctcccaggctggagggcagtggcacgatcttggctcactgcaacctctgcctccgggtttcaagcaattctctgcctcagcctcccaagtagctgggattataggcacccaccaccacgcctggctaattttttgtatttttagtagaggtggggtttcaccattttggccaggctggtcttgaactcctgacctcgtgatccacccaccctggcctcccaaagtgctgggattacaggtgtgagccaccgcgcctggcctgtaggttctcttttacgaggcaactaattccaataatgagagctccatcctcgtgacctaatcacctcccaaaaagccccaaacccatctcctaatactatcactttgggagttaggatttcaacatatgaattttgggtggacacaaacattcattcaataacagtgactatactatcctatgttaacattttactattttcaaagcttttgttcactttgtatatatgcatttatttatctttgtagcaaatgaaggataaaaatatcttttggagtattatcttgacatactctccagctgctagggatgacctgtcagtattgaccccttgggctgaagcaattcgatcctctcaaaactcaaattgaagtgagaactatctcttctcctttatttcctttcaccagaaatagctatttcatgttttaaaacaactggaaggtaactgaaaactttcagtggtgttaaatcactgtcagaaaaaaaaaaaaaatctgtttgaaagttggaaacagctcaagtaaagccatttaatctgaccagcataagcagattctgaagaaaatggtgaagaatatcattagcagcaatgcacacagtcatttattcattcaacagatgaacatttgatgaacacttactggttcttggggactatactccatgcctaaaatacaaagatgaacgaagacccaattcttgctctcaagaaaatgatagtctgttaagaagaatttactggaagatagataagtataatactgaaaagtgtgaagaatgaaacaataagatgtgcaaagtacagtgctgtcacaaaagagagagaaataaaagctaactggacaggtcagaagaggcttcacatggcactgtcttgaagaatgcatagaaatattctacaaccagcaacttccaattcagttgaactatctccatgcttcctgttcaaccgagattacattttcaatcttgtttctaaaggaaggaaaaaaagatgagtcatttggtacaaaaaagcaagaacagctatagtctacactataagataaatgtagggtactctttaaatctagtggacgctgtccgtaccctttcagcgctcccattttgtctcatcatctaattgcgtgcacctgaagactttctctgatgggtttgccactgcggggaaggctagaagtgctggaatattgaagacccaagcagcattcttcaggttaataatagatgagaattggatgataaaaactctaaactttttacactcaaataggatgcatgaggcatgtctatttcatttgctagaagtctccagtggcattaagtcccagtcatccatagtcataacttgctcattaatgtactctgtgtgttcctttcttctctatctcacttctctacttcctgttgatgctttctgtgatctccatcacagatcttcctgtttctcacttcctgttgatgctttctgtgatctccatcataatcagctacatggactcaaatttgtcatttaagtctgatcttggggaatccaattttagacattgagcaatggactggctgggagggatgaaagaggagacaaaggggctcctatgttcctggttcaggaaacggatgaataacatcaccagttagtgaataggcactgcctttcagtacctacgggagtgctttgttcagtacatatcctgcccagccaagcactgaagaattcatgaattttattgtaacctaaactgcctgtggcattatgaacctgtgtaatcatgggtagtgttggctttataccaggattttgctagcttgttagcatctccatgtgcatttgcaagaccttggccactcttcagtgttttctactccaatttgcatcattgtccctgcaggatgtttatcactcagacattctgaaatttggactgatgcttgacttagctctgtgattggatgcttctcccagaacctttctcacctctatcagctacgctaatgataatctagacagaggtttccctccacgggtgctgcagctcaaactgtgccctagaccactgtcagtcaacctcttcaatgccactgtttggtgctttgcttggttctttcagtctgcatgaagtcgcagctactcaacttacatccatgaagcagcaaggggaaacttcccattctcagtgttttaatctgttctctgttataaaggaggcatagtagagttgctggaccccaaagagtgacttgtaataaaataattctttaaaatgtatacatagatcttgtatcccagggcacacatttgacatgaaaatggctgttttggttgtaagtgcaggtaacagccatcaaggtgtacttgggactcctcctccactccaaatcttaggcctcattattatttagtttatcctgtctgtatctgcaagatgatttttacgtgagaacactagacttaccccttgacactgtgctttttgcagctcctcatatttgatgggcatgaaagctaatatgttgtctaattatggagagttttaagttattaattttatttttatcaggagatccttaaccccctatacaaattagatctaaatagatactaaaagatgaagttaatatttaactcctttacccaccagatgtagctgaatctttgcattggacaagtgagaatcctacttactctgaatcttagatactttgctttgagtatgattcaatgtcactgttgctacagaagtataaatgatggttatttatgcttgcatgttttccagaaagttaaagactattttattatattggctttctgattacttgactgaagttcataaactaacaaataaaaatctaaaaacactctctggggacctagacaaactataatgattaaagcatatagttactttgaagccaagatgaggtaaaggggataacttaagacatatttattcttaggctgacatatcttgtcattattatgttacaggtgcacatggaccatttattttttctcttatgaagaatttcaaacatatacaaaataaaaaagtaacataatgcataccatacactgctcattagctctaaccattattatcattaccatctggtttcctctctacctacccacttcctattctctgttttgaggcaaatccccgaaagtatatcacttctactctaaacatttcagactgtattcccaagtaacccccccaccccacttcttttttttttttttttgagacagagtctcgctctgtcacccaggctggagtgcagtggcacgatcttggctcactgcaacctccgcctcccaggttcaaatgattctcctgcctcagcctcccgagtagctgctactacaggcatgcgccaccacacccggataatttttttgtatttttagtacagatgggatttcaccatgttggtcaggctggtcttgaactcctgacctcaaatgatccgcccaccttggcccctcaaagtgctgagattacaggcgtgagccaccgcacccagccccggaaaatatttgcttaatatcatcaaatacattttatatttcccaaattatcctataggactcctctcttctctctgttgtctctgtttcctccacaccctacatcctcctcctccctcatcctcgttctcactctcccttttcatttttgaagaaacaggaccttttgtctaggtttgttgattacatccacatgatattgtttaatgtgtttcaccagctcctgtggtgctgacaaattagcagctaagtctagagagctacttgtagtcagtttgattttgttctttttttactcaagatgattgtatagaaagtgttgtgtactttcaacaaaaggtatataacgtttgatattggcagccattgatgatcattgttttgattgattatttcattatgagttgcaaaacaatgatatactgtttttacttcttcatttgttaggaggagcagttctataaagagaactttttgttttgttttgattttttgtttttgagacagagtcttgctctgtcacccaggctggagtgcagtggcataatctcggctcactgcaacctctgcctcccaggttcaagcaattctcctgcctcagcctccctagtagctgggattacaggcgcacgccaccacgcccggctaatttttgtatttttagtagagatgggattctgccatgttggccaggctggtctcaaactcctgacctcaggtgatccacccacctttgctttccaaagtgctgggattacaggtgtgagtcactgagcccggcttataaagagaactctgcatttctatttggttgcctcatagtataattgatacaaagcaaagcagagtaaatgcttcagtttttcccccaaaagaacaattttcaaaataatgaattgcttctctagtctcttccaaaagttgccagtgaattttttttttttttttttttgagatggagtcttgctctgtcaccaggctggagtgcagcagcgtgatcttggctcacttgcaacctccacctctcaggttcaagggattctcctgcctcatcctcccgaatagctgggactacagacgcgcaccaccacgcccagctaatttttgtatttttagtagagacggggtttcaccatgatgttggccaggacggtctcgatctcttgacctcgtgatctgcccacctcagcctcccaaagtgctgggattacaggcgtgagccaccgcacccgaccaccagtgaatattttatttatttattatcatccagttgtttgttttggcatcactgcgaatgcatgaatttaaatatatttaaatgtaactgaggctctccaccttctgtattatgatctttattgtcctcatatttttcatctttatgcgatggaagcctcctttacattgacctcctgagtcctttctgtatgacctttatacactttggttgaccccaacttctcttgtagatcaccagtgggcattcctgaggtgtgggtataacatttatctctggattatttattcattcagaaactttacttagtaattaacatttactaggcgttaacaaggaagcagtaaagcagcaaacatgctcatttcaatatttggattaatacaatcaatcaaaacagtagttattgacaacttacttattgtgtggttagcacactcaaaatttatgcagagaaaaaagatgagagattagacctcctccttactgtaacacattttcaatctgaccagagattttgcttctgcaaatttggatgcctagcattggcatcatcaagactttcatagctatggaaccatcagatataaaatacaccttagtatgcaacctcaacgtgttcttcctcttgcaattgaggttatattaatttattaagttcattttgggataaagaagacagaatcatagttctttcagcctgttattataacactttattatcctttacctccttccaatttttgtgtctaataattcgtgtgcatgtgaactgtcttcacttttgagttttattatgaaactcaaactacaatacacatgtatgcataaatttctgtatatgtggcatgcgtgtatatgtgtgtatgtatgtgaatatataaatttcgttgaatagagtggtatgattgtctttggcctccttaattatatatattagcatatgttctagggctcctgacgcttcttgcaggcagaaggcatttccagaggttgtgtagatccatgaaggacagttatcgggtcacatctcacatcatcactgtttctttcttgcccctgtcttacactagtacccttcagggtattgtatgaaagcttcattggttcaaattcattttgtcctctagtgctactttctatgctgacaaaagcatagtgaaactgatgccctggcttgtactgcagtaatattgcctccaagcatatcaagtacaggaagttaaatcctatatattattaagccagatcagtaacatgtacccaacaatgtggtgagacatattttgttttaataaaacgatgatgttacaaattcttcaaccttcccatatgtgtggaggtgtgtgtgaatgtctgtattaatctaccccatgtctcctggatagagtttttctacaaagaaccaagctcagcttcccctagtgttaagacattttgcttcatgcttggtatagtgtagtgctactcaaacctgagtaataaacaggccagtttaaagaaataaaaagccctatgctcaaccaatgctgattaaaattatttttattaaaatttacctatagaagcacgaatataaaacaaagggcacactctttatggtgaaagggcatatagatctacaacaacaaatcatattttcaaatcaaataaaacagaagtacagaaaagcaatagaactcaaaagcataaccttaatgtgtctgccaatgttgtcttggatacattaaatggccttttataatgtgaatatagtactagctgcaatggtgcaagttattgtatttttagcatttttcaatatatgttgtgaagactattttactgcttttctctattcagatctttgcaaaaaaactcatgtatacactataatcatgttttttgccattttgtagtcctatgcttttgtgtcatcagccttccccagctagaaaagtataatattctattattgtatgctgttgtcattttcccacaatcaaaagtacaaattattaaggaaactgaagtttcggtctaaaatgtgttgttcagatgaaattatccataagaaattaaagttgtgttcttataactggaaaaagaacttaacgcaagtataatatgtgcaaaactgggatgacttagttcttgctatcattaagaggggacaaatggcaacgagacgagctttaacagctgagaaaatcttatgcctagatgtacataggcctggaaattacatagcagtaaaactgtaccttcaaatagctcaaaagcagctcataataactgcttgagattatctcagtgataaagtcagtataacatagtgttttttattttaaaaaggaaaaatgattactttctttacagtatgctaattaaaatatacaggtgattgaaaaaactattaataaaaatcagtaattttgttgagtgggattatgaatattaattatttaattaaaatttccttcaatagttaacaaagatttattgagtttctgagtcaagcattcttctaaaggctctgccttattagaatttttaaatgtatttgcaatgagtgtatattaaatgtaaaatgtatgattcaggtttaaaaaaaaatagcagtgagagtaattgaatgctgaggttaaatagaatgggtgaatcaaccataccataaaaaacttctaagtggatattatattccaggcactctttcctacttcagctgttgataaaatcaaatatttccttagagacccttgactaatgcaggaaataaatgaatacttgcctatatagacaaaataataacaacaaaagccagaaaccaagccataccaaaacgaaacaaaaacagaaaaactgtgatgacataacttatctttcaataggattttctcagaatgggaggcaatatatattttatgcttccatggtctgtagattccaacatttgtataattaacatatacaattttacaagggaaaaatactattcaacaaatacgtaaatacgttcaatgtaatcatgcagtacttcgtttaaattgaccttttttttttttttttttttttacaaatggtgcaataaaataatcatgtttaccttcttcacatgttcattgatgttggcgtgcacggttttatctatatgatgtgaccttttgagaccacatgacattcacaaactgaaactaaaccaactaaataaccagttatccaaagataagcaaaagtggacgtcagtttaattagtaaggggagattttaatcagtaatacactattataatagagaagagttcagcatgaactgaactgaactttgatttgtgtagaggtgactgggagttttaaagggagaatgagagaatgagtttgagtggtggctcattaaagtcagggaagtaacaaattacaaaaagtggaaaggtgggattgttccctgggaaacctctacgtttgctaaatggcacttaaggttaggctcctgccttctcactgtcttcgggttttgactggaacaaagggtaaattattttggcagctttgagttttctcagaaatgcaccttaagtggggctagagttatcctagagaggtggctttgacctgttagaagctatgttagtgttttttgttcaggtctgtgcaggccaaggttatggcctagctgagaagagggctcagaggagcctagctaaagtttggtcaaggggagcgtcttggtggagcctcactcctgttcaagtaaagaagacacattattcatccttctgaacagtgtaagtccatttgtcattcgattgccttttgtttactaaggactagctaaatcatcggttgagacttgctagtagagcatagttgctggatgatgcacgtgatcaggcatttaatgagaggcacctctatggaaacaaacataaaaacaaaaacttgttggagaagaatataaatcctatttgttgagtctagagggcaggcagttaagaagttttctagacattgaattctaagcatcttcagatggtagagtggtaatctgatggattttctggtttatggtttgaatgtggtgatggcataaacattaatttcacagtcatagttatttcctggaacagaacacggatgatgctggagttccagtggactttctgaatggctcttgtagcaggagctccaggcatgaaggttgcctatacgtgatttgttgtggtggtaagtcttttgaagtttatatcaagttcttgggcttcagtgtgcaaggctttttcaaatcctgggggagaaagacagctacaagacaaccttgtaggttgtcccagtagaatcagtaggttgtaggagtcccagtaaggatttgggcagtcagattttaattctcagtgatgtcaagtcaagagggaaggcaaaaaattataaacatcaatttggagagatgtagcccgatattgaaggaaaactaaacaattgagtatttagtaagagtggcaaaatgggtgagatggcagaattcagtttagtttacaggtaaatgataaaatcctcaagacaatgaacaaaattggaatctgataacccacagtggtgtgttttacataaaacacaacaaaaccggaattggatgagaagagtccctggatctagggtcatcagaatgtagctattaagagttggattctgaagccaaattcaaattaggtgccttgtactttgcgcactgaatgctctcaggcaaattatttaccttctttgtgcctcagtctattcatttacaaaaggaatcttaagagtatatatctcataggattgttttgaaaattaatgagtacgttacattcaactgtgtctgccacattgctgtgaagttattaccttcctaatatacttacaaacttcataattaagaaaaaataaaaattcataaaatgaacatatttgtaataacttattataaatattgtatagttcattaaatgtattacctttagacatattaaaaataacacacccctcatccccccccaaaaaattcctgtatgcctgttttaaagcagttctgcatgttaaagctgcatttatgatatctaagaagtgttttttctcctaaatagcaggttggtaataatgtatattgcaatcgtaataatgtaagttctggttacaatagtttatctgggtaacatgtagaagttaagtgaatgaggtaataaattaaccaataagattacctttctggtagggaggaaaaacacttctgggttgaattaatattttgtacacatatgaaaggaagaagaaaaataagaaataccatttgcaaagctgactttaataaattttaattgaatggataaacattttagttaaaggtagtaatcttaacttgagattacttgagataaaaatatatattttcttaagagacatgattgttagataacttagagatataataagtggaagggttttccattaaggtaactgatagtccttaggtaaattaaataatgggaggaacttgtgttaggaaatcaacatccgagttacagttaaattggtgggagtctttccagtgcctgaagatacagagattttcaatagaaataaggtttttctgagaaattaagtgaaataaaatgtgcaatagtgattgataagcactgtttattgaagaaacgatttatctttattcttgccctttgctttttaaaacttttattgcattttcttctatttttaatacactttgttattgaagcataacataaccatataccataaacacagatagctaccactcagatcaccacttggatcaagaattaggaacgaacatatttgattttaactgcagtctcttctctcttacgctgaaaatctatgtttctaatgacattagtataattgcttatatggtaattaccttactatatacatataatggttccaaaataacagttcttgaattatttttataaaacaaaattaacacaaagatttatagtgatttctgcatttattttattattatatgtttacagacattggctaatgcttctgatgatcaggcttctctcgattaactgaagatagccttactctgcagctgtgtatttcttattccatctggagcctatgccatcagacattatgtctgccatattttttcttctgtggaaaatcagttttctttctgaagtgcttatttttacctttggctgctgatgtagatctttcatttgttcttcatcttaggctgtgccctggctctaaaaagtgttctcactgtctctttgctttcatttttttcctttcctatccctacgcccttaaatcacaatatctgtcagagttccagaagaaagaataaatactcaaaggagtcatgactattataatagttgatagtgtttactttggcctagttgtttctagatttgtctcaagaagcaaacaaaccaaggattatatatataccatcttgaccacaaaccaagcctcagattcctctatacatatgtcttaagttaccaatacatgttaactgttataatatttctttgactatatgtatacaccatgtagatgtagactatgtatactttgcatcctgctgtttatcacatgcctggcacatattaggcactgaaatagttgcttaatacatcaaaataaaattgaatagggaaaatataatttcttaagttagcattcccctctctccacccaaaagtattaaataaaaaaacaagagtttacgatgactttaacattatgatagagatacaagaaaaacaaataagtatagtaattgaaatggtgcccagaacaccctctttgttgacactaaaagtaagttcatcagaccaaatctgtactgttcagctctggggaacataatttaaatgagacactgaaaaactggagcctgtctagaaagcaacttataattttagggacgtattagctgttttcaaatattcagctaatcagtggaaatgcaatgaagcatattcttattatgatgagaagaaaggaaagagagccctttgtccactaaatatttaaacaaacaaactttgtaacagtgagagatggccaaaaatataaaaagcttaatctggaagtagtgagttgtttttcactggggtgtgggcaggggcttcatgtctatttaaggaatgctgtgttcccatggaaaaccagcacaagacaaggatgccctctcttaccattcctatttaacatagtattagaagtcctgaccagggaaatcaggcaagagaaagaaataaagcgcctccaactaggaagagaggaagtcaaactatctctgtttgcagacaacatgatgctatatctagaaaaccccatggtctcagcccaaaagcttcttgtgctgataaacaacttcagcaaagtctcaggatacaaaaccaatgtgccaaaatcactagcattcctatacaccaacaacagagagaaatctgttccattgcatctgttgcatgcagtgcaacagggagaaatcagtaatgcaatcacattcacaactgccatagaaagaataaaatacctaggaatacagctaactagaggggtgaaagatctctacgtggagaactaccaaacactcctcaaagaaatcagagatgacagaaacaaatggaaaaacattccatgttcatggataggaagaatcaatatcattaaaatggccacactgctcaacgcaatttattagattcaatgctattcctattaaactaccattgagattcttcagagaactagaagaaactattttaaagttcatatggaaccaataaaagagcccaagtagccaaggcaatcctaagcaatttattagagtcaatgctattcctattaaactaccattgagattcttcagagaactagaagaaactatttcaaagttcacatggaaccaaaaaaaagagcccaagtagccaaggcaatactaagcaaaaagagaaaagctggatgcatcacattacctgacttcaaactatactacagggctacagtggccaaaacagcatgatactggtacaagaacagacacatggatcaatggaacaaaacagagaaccaagaaataagactgcacacctagcaaccatctgatcttcaacaaagctgacaaaaacaagcaatggggaaaggactacctattcaataagtggtgctgggataactggctagccacatgcagaagatagaaactggaccccttccttacaccatgtacaaagattaactcaagatagattaaagacttaaatataaaacctcaaactataaaaaccctggaagacaacccgggcaataccatttaggacataggaacagacaaaggtttcatgacaaagatgccaaaagcaattgcaacaaaagcaaaaattgaaaaatggcatctaattaaactaaatagtttctgcacagcaaaggaaactatcaacagagtgagcagacaaactacagaatggaagaaaatgtttgcaaactatgcatccgacaaaggtctaaaatccagcatttataaggaacttaaacaaatctatgagaaaaaaaaaccctactaaaaaagtgggcaaagggcatgaacagacacttctcaaaagaagacatacatgcggccaacaagcatatgaaaaaagctcaacatcactaatcattagagaaatgcaaatcaaaaccacaatgaaataccatctcacaccagtcaggacggctattaataaaaagtcaaaaaatagtagatgctagcacggttgtggggaaaaaggagcacgtatacattgttggtgggactgtacattagttcaaccattgtggaagacagtgtggcaattcctcaaagacctacagacagaaataccatcaacccagcaatatcattactgcatttatacccaaaggaatataaatcgttctattacaaaggcacatgcacacgtatgttcattgcagcactattcacaatagcaaagacgtggaatcaacctaaatgcccaccaatgatagactggataaagcaaatgtggtacatatacaccatggtatactgcgtagccataagaaagaatgagaccatgtactttgcaggaacatggatggagttggaggccattatccttagcaaactaatacagtaacagaaaatcaaatactgtgtcttctcacttgcaggtgggagctaaatgatgaaaacacatggacacttagaggggaataacatacattgggacctgttggagggtggagggtgggaggagggagaggattaaaaaaaaataactgatggttagtaggcttatatctggatgacaaaataatctgtacaacaaatccccatgacataagtttacctatataacacacatgcacatgtacccctgaacttaaaagttaaaaacaaagaaaagctgtggataggtttggtggacaaactaggaactggagaatatatgggaattttacaatagtctcactggagccttagtgggttttagtagtgtttcaagggccatgtgtagggtgagaagacagtggatgcccaccaccaccactaccaccatcagcattcctttagctgaatagctcactcttcatctgtttcatattgggcttctgggtcacattctatttaaagaaagagtttccactcgactctgaggtccttgaatccaaagtatctctcataggtccttggagcaatcgtattggaatttttaaaatgttgattgaatggcttgaggtgaaaggaacctgttgcacagaactagttctctgttatgagtccacaaaggtcttaaattcgataaacattgtttttactagtaagtgtcttagtatcttaaaattatagtaagcttgattcttttctatcatgttggcacagttcagttagcaaataataaaatgaaacaatgatgatatgtaggtagacatattaacatgcctttgtatggagcaaacaataagaagcagatgggacagtctgaggaacgcattaacaagagtttctgaagccaactgctgctgcacctgttaacctggaaggagattaatgcagtagaacagctactgtctttccatatttcttaccacaaaaagatgttttattacattcattgtaacctcttggtaacacattcagaatacaagcttcttcctagtttccgcacatgtctttctcatgatagcatactgtctttgaaaattccatctgctttgatgatttgggctattctatcaaggcaatataaaattgtttttcttaaactttattacaggtcattgagtttcatgatctatagtgaatatttctgtattgatttgttggtatttttattttctcttctcaagctccttgtaagtggggactagcaatgtattttttaattttccgaactatttaaaatctttgatgccaatgattcaacttaaattctggttatatacaccaatgataatattttgtatctagccgatatttaatatttatcatttttttaaagaatcattcactttcatcactatcatagagatgggacaaaaaatataaagactattttacgtatgtatgacttgcttggtaattatttgctgaatgaatgaaaaatacaaaaattgatagttttgctcttacccatcttgtatatctcttccagtgctcattttgcattatgtattagttcatctttgcctttattaagagtagaaaacgccatttcatcttttacatataaaaatgagtctggtctgatacagttactcacatcttcgcttaaatttcttttcttcttcttttttttttttttttttggtggagtcttgctctgtcacccaggctggagtgcagtgacgcgatctctgctcactacaacctccatctcctgggttcaagtgattctcctgcctcagcctcccgagtagctgggattacaggcatgcaccaagccacccaactattttttgtatttttagtagagacggggcttcaccatgttggccaggctggtcttgaactcctgacctcaagtgatctgcccgtcttggccttccaaaatgctgtgattacaggtgtgagccaccgcacccagcccagtgaaatttcaatttgaatttggaagctctactaaggtagtaatgtgaactttcaatattattagaaagctcatcaatctgaaatttaacataaggtaaagaaataaaaagcattaagaccttacttcatatgagagctagaatccatgacctgaaaaataaagtagataaattcacttataaaactataatttaaactcttaacttgtaaatttggggaaattagtggtgaatgggtttctaatatatggaacatgaagcagtaggaaatatgttatgagttgtgacagatattccacctcccacgagactgtgatttttagaatcgacgtgttataaaattgatctgaactttgtccctgatgctggaaaagtggcaacctgtgactgctctaaagtaagctaaaggagctgaacaaggctgggcacagtggctcaggcctgtaatcccagcactttgggaagcagaggcgggcggatcatgaggtcaggagttcaagaccagcctgaccaacgcggtgaaatcccatctgtactaaaaatacaaaaattagccgggtgcagtggtacatgcttgtaatcccagctactcggggagctgaggcgggagaatcgcttgaacccaggaggcagaggttgcagtgaaccgcgattgtgccactgcactccagcctgggcgacagagtgagactgagtctcaaaaaaaaaaaacaaacaaaaaaagaagctgaacaaatgctggcattcatacatggtttgagaaatagccctttttcatttaagggaaagacttactgagatccagattgagaaaacaccccatcaacaataaagtggctcaggaaaatgttttatactagcacatcttcaagtttctacttaaggctattctacatgaatatttaaaaagaggagatgtcaaatataaaagcacaagaggccccgagggcttagtatctttatttgcgttaaggtttctcataaataattctatttggggatataggctctggtatatatgtaataaatgtgagtctttttaatatcagagttacccttaggatagtaagtgtatttatttcaaagaaatataaaaataaaatgaataaaatatttcaggtacctcagatcattgcaaattagtcctcaagtctctttcagtttttcttggattatatgaataatgctttgggatagaggaaactcaccaaagtatatttctgaggactgggggtgggaaaggtttcagaaaggagaaacccatgggaagaatttttctactgactgtcaagtaattcatctcaacagaagaaaagctgattttcgatcagtttaaggtaatagaatatgtcagaattcctggggttttctttgttcaatagcccacttaacctgctgcagaacaccctaggaataacaaatgaatcataaggtagagggacattccagcacacttgttttcttcaaatattgatattttccccttaaaattatatgtctagaaaagcttttgctcggacagagtctgtagggccagaaatataaataactgtcaaatataaagctgaatcgcctccacaagattttaggaacttctgggctggggaaatgtggcctgaaggaaggctgctggtttggccactctctgtattccatcagaaaaaatggtggggtataatcagaagttgaaatgctcacagtagttttaccccatggcttgtcagctgaatattgcgacaatataggaattcttcatcgcagaaggaatgagcctccctggactgatgattttctcagtttatggtgtgtgtgacgtttttgtaaagtggcaaatagttgggggcatgagctagaaggtaactttaggaggttcaaccaaccaagtaccacctgcgaattggacaaaattcaatggacaaaagaaaacttaattgtcagcttactcccgccttttactcccgggacctagcttatagcacatggttcataaaagactctataaatgattactgaatgaatgaataagtgaaagtgcacaaatgaatgtatctctgagattttaagacacttttgtgttcatgcgtcttgcctacctgtctccggtccttctgaattcataaaaagaagaaagttcattttttctggaatgactgatcttaggaaataggaataagtaattctgatgggtagaaagtgcagtgtatgaagattcagaagggtaaggccaattaatttaaacactctgagtctatgttctaacctgtaaagaaggctgataatatttgccttctctgctatggtgttcccgaattgtgctttccaagaaatataccatcacacaatatatggccgtggtgaatacagtctccaatgtccttctccccctgcaatgtgccaacagagtgatctccctaagcatacagggtggtgcagtgtaaaggcacactggtttctgtttgaattccagctttgctacttactacctccataatgtgtagcaagatacttcatcactcacctgtaaaatgatgataaaatgatacttatttctatgagaattaaatagctgatacaagtaaagagcttaaaacagtatttggcctgttttaagtgctcaatagatcctagatgttgtcattgctgttactactgctgctgctgctactactactactactacatatttgtttttggaccctacttaatcccataggttgccacaactactgtctacataatgaaatctaacccccaagtataggatactggtttctaaaaatctagttcatggctatagttctagcttcattcaccaccgttctactagcaataccagtccatctgtatttcctccaatagaccactctatttttttttttttttttgcctctgcacctttacactggatgtttattttgcctttagtcacatatccacaaagagatgttctgggctccatatgatggagttgcatacagtgctgagcttttctttcagggacatattcagaaaggatgagtttttgattgttgtcaaatttgctgttatgctgattttttttagaactgtttgggcgactaatacaaattcatccaaagcttgttaagaatacattgtaatcatcagtatttttaaaaagcgattcttcattctttaccattgtgtttcccatcccaaggatttcttcagattaaaatattaaatgggacaggcaacactttgaatgtaaaggagaaatgggaaacactaacacaatggtggcatgataggggatgaaacacagaaagttggaaccaaaggggagcaccatcgttcatatttatgtgtaaggaaaagaacagaatgtccttgggtagtttactatttcttaataattctcctcacttttaggcaagcttgccagtttttttcagtggggatcacaaatgcctatctgtctgtctgtctgtctgtctgtctatctatctatctatctatctatctatctatctatctatctatctatctacctacctacctacctatctaatctatctatcatctaatatattatgtgtgcgtgtgtgtgtgtgtgtgtgtgtgtgtgtgtgtgtgtgtgtatgtaacgatttaattgaagcaatggtaagacattacaacttcaaaaatactgttttacttcacatacactttacctctaggtttcatagcaagacaatagatgggtgtagttttagtattatttacttttatttgttaattcaaggcactatagaaatacttaatctgtttaaaccccaaacatctctttaaaatattttatgtgacgagcaaacagaacatcatgatctaataaaaatgaaaatgtttttgatgttaaatgttgaggtaaaacttttgttcagttattataaaataatgacattttgagaacctcttatttttaattttatcgtctctaaaattgagacaatcacatcttggtatcgataatttttgatgcatgatgtaatatttaaaggactttaaaaatgtaaaatgctgcataaatattattgctctgcttaacagtgtttcaaatacatttttggaaaaatagcaaagtaagagataacatgtatctaaagttctcatcccttatcaactaaatattatgaaaaccttagcttctcttgcttctccagaatgacagattagcttcagcctaccttagactaggcatatggaattggcaaacgctctccttagcaactgcaaagttcaccgcagatgcatttaacagaaatagcacagatacaattaagcaggtagaaagaaagaatgagcatgtaaaacacctacaatattccagatttcctgctcacttaattggatgattcagatacctctctttcataatgtccaggtgaaagaaatgccggttcctcttatttctctacatcaaactaaagctccacttaccagagcaaacacaagtacaatctgttatgttttggactgtctaatccattctctgtagtttcacaagaatctggtgagcttacatggcatccagagaacagggtgatgagtaaagcccttaactctacattgtctaaagaacctgatttattcaaagaggaggcagctctctcacttcttattaacagagggtagagagtttctttcccaaggccaagaggggttttagctattaatacactttctctccctccgtccctggtgtgtgtgtgtgtgtgtgtgtgtgtgtgtgtgtgtctgtttctctcactgtcaattttgagtggggtttcaaggtttaaataaggtgacaagtctagtagaaaaatctctgaaagagctatttgtagaacattaactgactagttgtgtgactttgtacaaccagcttaaggattcagttttataacagataagtttagggaaataaattgcactgcacattgccttcggtctgttgtacctcaaatagcttaggaatctgttttctcctaaaacatcttcctggaagctgggtttccgctccaccccacctcccatgtgtttatgcattcctctgctcctccccttaactgagaatcctcattagaggcctgggtaaaatgtttcattgttagagttataatatatcaataatttacattaccttaattttgtaatttcccagggcattttgaaatgttatgataacatgaaaaatgtatgactttcctcaatgaaaagttaattaacaattgcttttattcttcaatgaacagctttatggctaaattattactagttttgtttttaattagatgactaaataatgcaaaattagaccatctttgtcctgacactgaattagaccattctttggcaactcgtgtacaaactattttcatttttaaaaaaatgtatgattctgagaacaagtaaatgcaattagaattgtctttcagagggaaagtggccccaaatgatgtcaagaagccagttttatgataaagatgtctatttttatgaaataaaagtaaggagaaaaaaagaattaatacaacttcactttgagattttatttttttaattcttgagttaggctgaaggccagatttgtaattgctcgtgtatgtgctttctaaaacttgcttaaggaaaactggatggattttctaaaaggcaattaaagatttgcagttgaaaaatcatcctccctcataagtattggtgtatacagtggtttccctgcatggaggatatgctggacaatatattgagaactgcagctccaggcaaaattaaactagtgttttttagagatactaggattagcttgtttactaatttgttaaagcagctgcgtttacgaaatacataagccttaagttttaatcttagaaacaccctttcccaaatattctaacaagctcaatggtcctctgcctttgctgatatttagaacatcacgagagtctttaaaacttacagatgcctaggtcccacctgggaagtttctaatttaattggtttaggtggcaacctagtcactgggctgtttaaaagctccccaggtgactataatgcacaggaaaggttgcaagccattgaacttgtaaacaatatagcagctcccatacaaaagcccgtaaattcaaagaaaatccagccatatgaacaagaaaaaaaatgtcaacgaagcagggacttcataaacatatgtttgcaacaacacatcattgaatatgattaatttgatatatctgttttgttataaaatgtctagaaaaaaatgtaatgtaacaaaaccagcaagcaatttaaaacaaataggaaaagatgattagtagatcatatgatataatttttagataatacaggaatcggacattgaatttacgttagatttttatagacagatatacagaaaaacactcagagtagacaacaggatgttagcagtggtgctgcttaatgaaaaaatgagttatctgtacttttcttaatagttattgttgtatctttttatggtaaacatacattgtttttgtaacaggagagaaaaagtagtgttctttccttgaaccaaaaaaaaagtaggccatttaaaaattaatgaataaggaaaatacacatgaaaacttctggaataagaacaaagctgtaatcaaagaaaattaatagccttaatttttttatatttgagattaaagggaaaataagagaactaaacatttgattctgtaagaaacctttaaaaagcagtacaagaaataacttcaaaaatactatattgagaaatgctttcaaacaactaagtatgaattatctgtttacaaaattccaaaccatgaaaatagtatttaaacctctatgttcatgttctaaagcccttataatcttgattatgagacttcaaaaaaatagcatacacattgaaaactatcaaccaatctcaggaatacagacgttcaaatcttataaaacatagcagatttagccaataagagaagaagttatcatgccaaattggatttatttcaggaaaacatatatgcctactataagagaatctatttacatccttcattgtaggtaaagatcagaaggaaaaaatatacaatactttttagttatgaaaaagtattgataaatgaaaagaatctgtccctaatttaggagtagaaacaaaacttttagcaatgtaagaatagatgatagtttataagcatgaaaaatattgtctatctcaaaacaagagccaactctgtgatcaatgttgaaatattgaaggtatcctcattaaaattagaaatataactagaatgactaccaaaactgctctttttaaatgctattttgcatattctagtcagtgaaagaagccaagtaaaagaaacaggaagtataagtattggggaaaaaagtcaaattattcatattaatagatgatattgtcaacttggtactaagtaaatcaacaatgacaactattataactaatgggaaaaattagtcccaaagctcattaagaaaagaaaaaacctagaaataattaaatattaattaaatgtaatttttctaaatgctaatttctcttttaacaacctattgaaaatcaaagctatcattttccacagaagttcaaaatgtgaaattactgtgaatttatttagcatgaaatttggtgatatacaagcctttactggaaaaataacagaatatttgcatccatggacagatataattttatatttcttggtgggaatattaatattttagacatataatttactacaaattaagctaaaatctgatagaaacacataaaatttaaattggggtggcaggaagacattggatgtgacaagaattactctaaagtttatctggcagcaatatagatgaggattaatagaaaatgttgaaaaccttaaatgaaaggtcatttgcccatgtagctattagagtgtttaataaaacttctactggctgggtgcggtgtctcacgcctgtaatcccagcactttgcgaggccgaggcgggtggatcacctgaggtcaggagttcgagaccagcctaaccaacatcgtgaaacccagcctctacttaaaaatacaaaaattagccgggcatgatggcaggcgcctgtaatcccagctactcgggaggctgcggcaggagaatcgcttgatccagggaggcagaggttgcagtgagctgagatttcgccactgcactccagcctgggcaacagagcaagactctgtataaaaaaaaaaaaaaaatctactaaaagtctatacaaacagattagtgaaacaaaagagaaaatcccaaaatatgctcaagtgtatataataaaaatggaatttcaaatcagtggatagagatggactatgaaagaaatggttttgataatcatgttaaaaggcaaaaccctgctttacacaatgcagtgaattaaatttcaccttgaacaaatattcaatcataattaagcttaagaagcccaaagaacaggaagaacgataggtgaatatttctacaatgaggcgatggtagagaactatgtagaaatgattttaaaaacccaaaatttaaaatggaaaacacatagataatttttaaaatctgtacattaaaaaccagtaaactgaaattgaatcttacaaatcaattcagaaaaataaatgcattgcctaattttaagcatacaggaagaaagtgttagacctggaggtcattattttaagtgaaatgaaccagacacagaaagtcaaatattgcatgttcacccataattgtgtgctaaaaaatgtgtacacatgtacacagagagtggaatgatagacaatggaaacttagtagggtgagggggttggagtggagtggataatgagaaattaatgtgtatgatatatttgggtgagggacgctctaaaagccctaacttgaccactacacaatctatgcatgtaacaaaattacacatgtaccccatatatttggacaaaaagaaaataaaacacatccaaaggtatatgaaaaaatgttcgatctcatttgtaaccaaataatgaaaataaaaataacttttccttgtatactttgtatgcttctgacagaagactgaatcaatttatttcatgagagcagtttgcaataccaatcaagagaaagcgtgcttacacttgactaagcaattgcatttccagggaaattatcgaagaaatgcttacatctatgtgcaaagactgagttgtacctatatttattgtttaattgttattacagtgaaaaatggaaacaacaccagtattcatcagtaggaggctactaaaaaatgatatatctctaaagaagggaaatttaaaataaaattttacaggtgattgcattgatattaaaggtaatccaaatacatacatgaaaaaataaagcagactgtaatacacagtatgtatacatataatgctgtattatgatcccgcttatatatgcatatatattaaaatataaatttttaacctctgggaaatgcattcctacctaattttaagtctctcattttttcttattggaattttaaaaagtgtacaatgcttattaatgaatataaatttgtttgaatcaatgttttcaatttttaatcaaattatctgtacatgattcaagtaatttttacttcataagttcttttatttaaatatgctgcattcctctctcatttctcactcctcagaggcagatatttgagtcattctctttttctaatgcgtgacaaatctgtaataacatgtttatatctctaattcttgattttctcattttttcatggtctacagtctctcttatgagagatgaaaaattatctcatttatatctaccccatgtatttgttctattaactaatttttcttttacatgaagaccttaaatgttaatttttttcttcaaaacagtgtcaaaagtatgtcttaacccttcacatgataaaatggggattttagtggtcctccatgtttcttcacttctcctactgaatttcttctcccaaattctgtaaagtctacttttaattttatgttgagttgcattccttctgtgttctctaactatgattaggtctcgtgttttgtcaaagatttattctaaaaattgaaaacatataaacagtatgtacactattattatagcaccataaatatatttcattgcagagtctattaccgtgttgggcttatatttcctttcctatgatttccatggcaatttacctctgctactttacagaaaatttcaagattcaagttaaaatggattctctttttttttctttttttgttttttgagacagagtctcactctgtcacccaggctggagtgcagtggtgccatctcggctcactgcagcctctgcctcctggattgaagcgattcttctgcctcagcctcccaactagctgggattataggcacacaccgccacacctggctaatttttgtatttttagtagagatggggtttcaccatgttggccaggctggtctcaaactcctgacctcaggtgatccacccgcctcggcctcccaaattgctgggattacaggcatgagccactgctccagccaaaatggattatcttttcttacactcagtaatctctcaaattcaaataacgacataggaaattcctaagtctattgagtctttatctaccaaatctccctctctttcactttctctgtctctcttatgtacacgtagacacgcacacactcccttctcaaaaggtaagagaataggatggtttgtaaaggggaaacgtctctggaaacacccacactttaataatgtcttaactaatcacattgcttgggtgtttttgttattttgtagtttgcggttttgtttgttttattttctgataacctgcagagtaggaaagaagagagtccagaaacttgttgtaaagctggacttcaagttggaagaaatattggaaggaccttttaaaaagagagttgtatgatatcgaagcagcctatttccctgaccccttcccgggactcgtgacagggttgcctcatttacctagaccagttttcaactccttatgggagggagcatgcaagtgaattccaggggtttggggtacgaatgatcctgtcacccaggtactgagtatagtacccaatagtcagtttttcaacccttatccccctccctccttccccttctagtaatccctagtgtctatcgttttcacctttatgtccatgagtacccaatatatagctcccacttacaagtgagaacatgtggtatttggcgttccgttgctgcatgaattcgcctaggataatggcctccatcacagctgcatctgtgttgctacgaaggacatgatttcattctgttttatggctgcatagtattccatggggtatatttagattttctttatccagtccaccaatgatgtgtatctaggttaattccatgtctttgctattgtgaatagtgctgtgatgaacacgtgaatgcatgtgtctttatgttaaaacaattttatttattttggatatatattcagtaatgggattgctggattgaatggtagttctgtcttaaattctttgggaaatctccaaactgccttccacagtggctgaactaatttacattcccaccaacagtgtataagcattcccttttctctgcggcttcaccagcatttgttgttttttgagtttttaataatggcctttctgactggtgtgcgatggtatctcattgtggttttgatttgcatttctctgacaattaatgttattcagcattttttcatatgcttgtaggctacttgtatgtcttcttttgagaggtgtctgttcatgccctttgcctgttttttgatggcgttgtattttgcttgttcagttttttaagttccttgtaaattctagatattgaacctttgtgtgatatgtagtttgtaatgattttctcctgttccgtaggttgtctgttactctgttgatagtttcttttgctgtgcagaagctttttagtttaattaggtctcgcttgtcaattttttggttttgctccaattgcttttgaggatttagtcataaatgctttcctaaccccaatgtccagaatgatgtttcttaggttttcttctacaattcttctagtttgaggtcttacatttaaatctttaatcatcttgggttaatttttatacatgtcgaaaattagggatccagtttcattcttccacatatggctagccagtccatttattgaacagggagtcctttcccattgcttatttttgtcaactttgttgaaaatcatatggctgcaggtgtgtggctttatttctgggttctctactttgttccattggtttatgtgtctgtttttgtgccagtaccatgctgtttttgtttttgtttttgctcttatttaaatgttataaaaattgcctatatttaagatgtataatgggatgttttgatgtgcatatacgcagtgaactgattactacagttaagctaattaacatatccatctcttcacatagttattttgtgtctgtggtaagaaaacttacaatttactctcagcaaatttcaagtatacaatacagtattactgactatagtccctatgctgtgcattagatctccagaacttattcattgtatgtaactgaaacgttataccatgctgattcggttgctgtagccttatagtatagtttgaagttgggtaatgtgctgcctctggctttgttctttttccttaggattacttttgggctcctttttggttctatatgaattttagtatagcttttttccagttctgtgaaaaatgatgttagtggtttgataggaataacatttaattcgtagattgctttgggtagtatggccattttaatgatattgattcttctaatccatgagtatggaaagtttttctatttgtttgtgtcatctgtgatttattttagtagtgttctgtaagtcttctcatagagatcattcacctcttttattttttatggctattataaatgggattgcatacttgatttggtgcttagcttgaaaattactggtatgtagaaatgttactgatttttgtatattgattttgtttcctgaaactttactgaagtcagtgctatttttagatggatatatgagaatatttaacttatatggagagtcatagaaattacacaatttgtatttcatacatcatccacacacatgctttctttacttaccagaatagtggaaatgctgcataaaatgaacttaatggtttttatttcctttcttcataaatgtacagtttatcaagaagatgccctttggcttactgacgtgtaaggagggactaaaaggaaaggaaaaagaataggtagctctaacttttcctttctgtctacatcatcattttttattgcaaggtggttggccaatataaggaaggaacaccactaagaaaagatattatgtggttttttggtcattagtgtttcttagaatgtcactcacttcttcctgcatatatatatctcaaatatatatatacacgtatatacacatatatatacatatatatctcaaatatatatacatatatatctcaaatatatatatatacacatatatatttagaagattatttggtgaatacactattagaacaaaaagaaagaagtattagcgaagtgacagggtatttcccaactcagatatatgatacctgctaatggactgttcgtgattataaatgtagtatatgctcattgtagacattatgaaaaacgtaaaatcccctataattagacctctatttgtgctaggcacatgatgacttttcttgctctgcaacaactattttttttctcttaaagtttataatgttgtcagtattgtcggatatcctcagggattccatcatcttttcttaattgtggttaattacttaaccaattattacaaattattttcctataatttattgctcttagtatcaaacaattaaacaccctaggaaatgtcttattacttgatctatgaactggtgagaatctatattctacataggggcttgttttctggttttaaatctaatacagtcgtttggcaaataaagacaaaaaataaatgttgtctacctacttttcaattatccaagtagtttaaaataaaaacatccttactgattttttaaactcttatataattgcctaattctacagtaactggggttggtagtaactaaaacctgttgtattcctagtgatgcccaatgagccttgggaaatgaataggtgggtatagtccagttgctagaaaatacttgcttgttactgacttatctgagaggaaataaacactttcatttatcagggacagagtataaagtgttcctcactgaagcatttctaaaagctctacagtcctttgaatactgataaggactctgaaatgcaagggaaaatatgcaagtaatctggactatcacaggttattttatgaactgctcatatttttactcctttgataagtattatttcccccaaccccaaacccgataaattcgataacccttttcatatataatattatcagcaaggcatcttagagtttcctttaaaaaatgtaaattaccaagagaaccagaatgattttggggctcataatggtagatcttaaagagagtggaaagatcagtagttttcgcattttgctacacattggtggagtgtttacaaacagtgatatctgcgttctatttccacagagtctgacttaagtggtctgtaatccgagcatctcagtttgaaaagtttcctagataattttaatgtgtatccaacgttgaaagccagagtaaaatgaaggaagttctggggcctcagataagcaacttcactacttttttcaggttctttgaataattgacatcatccccaaattcaaatcgttgatagtcatgatgagtacctgttttactccagaaatctatataatattggttacctcagtgcttgctcttaacttccataatcaaaggaggaagagagactcatcgtgttcagatacaggttgtgtaacgtgtgtctgtaaaatactaatgtgattgacttcatccatccattcacctatccatccatgcatccatccatgtatacctcgtgtacctccattcgtctactcatccaatgtctctgtctaggctccaggactgctgccttaaggttgtttaccaactcagtaggtagtatgttatcctcaggctttggaaacaggggggtttagttaaagagcaaaccaactcaacatactagattaacttgaaagggaaaagttatgcttagtgcataaattctttccctcttgtcctttcaaatccatttttcattctttaccactgtgctttgtgtcctggggactgccctttaggaatggcatcagagttcctttgccctacagtttccagttgagacaggctgcagcaggaggagtacagtggataagaaaagggtggagtatttattttcatgtggccccatgggatttccacaggttagctctgaacagctaacattagaccagagcttctgctggacagttctctcttgcatttctattgggtctggctctctagttcaggaaacgtccttcctcttaacccttgaggtctacagttaactctccgtcatcccttcttgaatttcctaacactgagcatatctctgttgataacccctttagcaaactggcctcacataccccgagattgagaaatcaatcctccagtttctaccgggactctgattgagttaatgtgggataatttgcttacactaccctcttataaagtgactatgtacattagcatattaactcctttgaggattttcatttacttttgttattaaagcattacacgttttttgataatgtgtaggagactcaatcatagccagaagtgtctcagacgcaagcacctgtaatgattcccttatatacagttttatcccaccagaaattgggactaggcacaagtgttctaggtaacatttcaggatcctactgtcataaagattattatggcacaaaaactatttggctagaagtatccccagactcctctgtgccacattatcttcctttatccagttatctgaggatgtgcttgcagtggcagactagcttttggggaaattttatttcaagaaaaaaagcagggaggaagaaaagggtaagaaatgaggaagggaagaggcccatgggctaggagtgggctgtcctgtttctgggaaactttgtgaaggtttcaggagtagtagtaactcatggtgaatgaaaatgagagggaattgttggcttttaaagtaataggatatgcccctttatgatgggattaagagatacaagtaagctgggcgcggtggctcacgcctgtaaatcccaacactttgggaggccgaggcaggcagatcacctgaggtcaggagttcgagaccagcctgaccaaagtggaaaaagcccatctctactaaaaatacaaaattagccaggcgtggtggtgcatgcctgtaaccccagctactccggagtctgaggcaggagaatctcttgaacccaggaggcggaggttgtggtgagctgagatggcgccattgcactccagcctgggcaacaagagcaaaactccgtctccagaaaaaaaaaaaagagatacaagtaaagttatgaaatcacctgtggtttctagacagttttttttgtgtgtgtgaaatattaagaacagaatacatgtgctaaaacattttaaaagcttaataaggtcttttaaatcttgcctcttccttttgctcgtctaatattacctcctatgtccacccccacggattatttacatttaatgctttctagtgaaatcattaaaatgagatttatggattattcataataggcaggatgaaaaaggaaggtgaggcgacagtgatccttccttagctgttaatggataaggagtttcacagcaagaggaaaaaggcataacattagtattaccggttgtctaagggggagagatagaattgtttttttttccttgcattttctgtactctactcttatttccaaatattctttaatgtttgtgtgactttgtgacttctatattcagcgcaaaaaggattaaagaattaatttaggaaatcaatttacactgagtgtctccagtgccagagagggagggaaggacattcgtagctacagtgttcataatagcaaataattgtattatggtcataccatggaatattatatagcagtataaataattaactatgatcacatgtaagaatatgagaaaatcataaaaacataatgtagaggtccacaaacattttcttaaagggccagatagtacatatttcaggcttctaggtcatattgcaaatacctaactatgttgttgtggcatcaaagcagccatagttattatatgagtgaataggtgtgagtgagtctaataaaacttcatttttaaaaactgtcagggaggccgggcgcggtggctcacgcctgtaatcccagcactttgggaggccgagatgggcggatcatgaggtcagcagatcgagaccatcctggctaacacggtgaaaccccgtctctactaaaaatacaagaaattagcggggcgtggtggcgggcgcctgtagtcccagctactcgggaggctgaggcaggagaatggcgtgaacccgggaggcggagcttgcagtgagccgagatcgcgccactgcgctccagcctggggaagtgcactcactccagagccggggagcccatgggcggtagtgtgctgacccttgtattagacaacactccagaaagctcaagcataggaacacctaatgaaaatattgttttggcatacatgcatgtgtgataaatcgaaaaaaccaacacaaaacaaatgagcaaacaaaagaaatcaaaggcaatgatatgacaatccccagattctggatggtagttaatcctgggtaaatggagggaggggtacaaaagagtgaagaactagtgtaggagcacataggttcaggtgtgagttgttgctaatatttcagttattgggatggacatatgtttgttttattattgagctttgtaatttacatatccattacatatattcttttatgcatcaaatatcacattacacaaagggaaatcataaaaattggggaaaaattggaggcaagcatagatcttggggcccagtgtagcatgcttttttctatttttaaatttaaaattgtttttagagatgcggtatttctctgtcacccaggcttgaacccctaggttcaagcaatcctcctgaatagctgggattacaggtgggtgccacttcacctggctaactaaaacaaaattcttttaaagatatggtctctctttgttgcccaggctgatctctaactcctggcctcaggtaaccctcccacctcagcctcccagggggattataggcacaagtcagtgtgcctcacttccttcaacattcttaaatacatcttggaagcacagtgtttattaccttgtttctaaaagagatgcatctattgtaatcatatttataatgttcttatatatggttttcattagttttactgaaactctcaacctattgttttttgatgatgactaccaatattcattgattcactgataatctttgtaatgtccttaactcttagggattagatgacattaaatctttatcaagaagtggattttgttacttaagtattttagtagcaacaaaattggtcacaacgacattccactgaagcagaatagtcagaaagcaatccaagccgcagaaataaattaggttgagcaagactacacctaatggcattgagataaagaccctactcctgactcactgccccgtgttctagtggtgtgcctgctctgcaattctccttaagttgatgtgcatctatctctttaggaccagggggtatttagtctgtaatggcttttccggcaacgtgtctcatttcagctgcttcagttgtcgagataacactctcgtcactgcctctctgatggtttcccattcaacagcagtcatttcatcttgggacacttttcctcacagtcaacagtttttcctttgtgtaattaagtctcatttttttctggatagatccatttgtgccagaactcttctgctgccttgaagcctgcaccattcagttatttttagtgttatctctttcctttcattagcacagagctaaattgtgcatattttgttctttcagctttatacagattaagatcttctagctccttagtcattcattttagctgttgcattgaatttcctacagttcatttaaatcacccagttcagtttaatatgcccagaataaataaagcatcattttttttcacatctaatcacctaccccgaccaatggcaagtgtaaggattataaacctttgtgactttgcctgtttactcccttagtaggtgagctctgagccaaaatataaattcattaaagtttttcttaatatctctagtctctacttctggctcccttccctcagggtattatcccctttacaaatatttttttgtgtctttaggtttccatttgttttttaaaaatacattcttatcaaaacgggaaaatattttcccatttctttcataaaccatgttttctcaatagttatctctaatcaaatacaagaaacagggaaataggtagtgccttacaaaggaattttagccatatacgtttggataaggtgaattttccatatcctggagatggttttgagtactcaggaggctacatctgaaaaaaaatatatagttattctctatctgggagtcaacttaattcttttgatggaaaaatagaggctgtgaatccccagctccagctggcagagatcactttgctcagaagttttgcacgtaaaaagaaacttcttttctgggatcactgatttatttcagctgtaccctgaaactggtagtcagatacaccctgtaaccagcagatctgatattctccagccttttcgggcttgtacatcaatcgtttaaactacactataatggggatcatttgccaaagctcattgccattctcttctagtcataccaatttataattacttttctctcaatatgtacccacgactctcctttcttcacccttatgatatttattcaaatattaaatgttgccctttttttctacctttattccaaatgccttagaggtctggcgtaaactatatggctataacctattgcatttttaccccatagatggaaaatgtattggtgaattgtttataaggttggaagttcccctgaaaataaaatccacccaccccactaggggagtacggaaactatatataatatgacacacatcgctattacttttattacatatgcttattatttattgttcaaattttcaaatatggtcctgcacacaggcaattttcacaaaagagcagtatcagtgttaatcagtttgaaacaggaaaggatttgtgaccccaccttacaaaatacaattccttatggttacaaaatctcattcaaatggattctattgtagccatatcaataaggaaactgatctatcagccaaaatcggaaatagccctgataaagtagactgagcttacattcatgcacagatgtttgctcattatttttacttgataaggacagatacgtttgtgtttagcataatgcgtgtgtgtatatttgaatagattttctagaccctcattttagttctagtaacaattgtctggttctgaatagggactttccactttacagaagcaggcaaaatttaatttgtcatagctaccactgaacccatttcctttatatactcaatctgctttgacacagtagatattggagtttcaaaccttaaaatgaaatacagctttatgatgaaatataagttgatatgaatactttcaatatacctatattctatgttacactcagttagctggcatttggtcttcactcatggacattttaaaaactcatacattctttagtgtttgataatgtgacaaatcaaccccctataaaattaactttaaatcaattgatacgttagcatgtgagtatatgtgtgtgactatgaatacatacttatataagcacacttatatgcttatacgtttgtttgaatctctcactgaccttagccataaaaacacttttattctgttgatttatacctcagcctacatgtgaacaaaagattcagcaaatcagaataacacagttactctattttctaatttatttgtaataaatatgcattacctgcataacgtttacatcaatatgggcatacattacttatgcaatgtaatgatctaaataacgcaactatcgacagtaaccacgcactctccccctagcaattacagaatacagtttctctgttgcacaacatgcctgactatcgtaaatttagggttatctccttattaggattccatttacactcttaatgaatcatatttattttatagcagcttattagtaaagttgactgccaagatataggcaatacatacaatttcctcaaaaactggggctttcactgttaatttaacaaacctatatgaatccatataatatatgaatcatatgaatatatataatatgtaataagataaaatgcataatttaacatatatgaaatatatatagtattaattgttaatatgtattaatatagtataaaataatatatataataaatgtataatatataatatatgaatcatataatagaaaaatatatgcatagacttgagttaggtgtaaagaatggaaaaattaaaaaatagtgcacttgatgagttcacaacctagtatagtgtgtcatagagaatgtagcattttgtgtatgcaatagtaaatatatataatgcaaaagaaatgaatggttttgcttagggtaggaggaatggggtaatatttgagataaatctcaaagcatgtaaagatttatcaaatgaagaattggggttatggaggagtaggggttgcattccaggagggagggaccaacatgtacaaaagcttaaaggaatgtaatttcatagtatctgggaaggacaatgggtagctatatgtttctgaaatcttgaatgcttgggtgaaataccaaaaatagggctagaaaagcaggttatgattagattgtgaaggcatttaaaagcgtcttgattagttgggaaataatttctacaacgttttagttgtataaataacaaaagcttcttttaatccagatacttagtggaagttcctctttctctaagtagaatactagacctaataataataataataataccgtatcatatatttttattacttttttggttttctgactactttcaagtacagagatggtccccgacatacagtagttcaacttaacaatttttcgactttaggatggtgcgaaagtgatactcatgctgtggaaaccatactttgaggacctatacaactattctggttttgactttcagtatagtatttaataaattacatgaaatattcaacattttattataaaataggctttgtgttttatgatttttttcccaactgtaggctaacgtaagtgttctaagcatgtttaagataggctaggctaacctatgatgtacagtctgttaggtgtatcaaatgcattttcaagtttcaaaatttccaaactatgatgggtatatcagcatgtaacttcattgtaagttgaaatgcccatcaaagatagactggataaagaaaatgtggcacatatacaccatggaatactgtgcagccataaaaaattatgagtttatgtcctttgcagggacatggatgaagctggaaaccatcattctcagcaaactaaaacaggaacagaaaaccaaataccacatgttctgtcttataagtgggagttgaacaacaagaacacatggacacagggaagggaacatcacacacctgggcctgtcagggggtggggggcaaagggagggatagcattaggagaaatacctaatgtagatgacgggttgatgggtgcagcagtccaccatagcacgtgcatacctatgtaacaaacctgcacgttctgcacatgtatcccagaacttaaaatataataataatataaaagaaaagtatctgtgcttgatgggttttgatatcctcagtaactatggccaattagttgaacatggcacagtattatccatttgcagtagaggaaacaaaggagaaaccagaggaacagtgagagagagagagagagagaaagctgctggtcatgtcctctttccagcatgtcaccctccatattcttcttcaaatcaaaaaacgtagaacggaagggagcttagtagcattcagctctgctacactgcacaccagctatacacacaggcaatcaatatggtttggacacagctgatataatttggtggagctctaattgaatttttccccttcttaatataattacacctacagaacgtctccaattaagtgtccccccatcagtctcaaaattaaatataccaaatggaactcattatctactcccacataaaccagctcttcatgactctttcccctttctattaagcaccactgcttccaggctcctatatctgaaatccctgaagtcgcttatttttgtattcctttctccatcccgaaatccattcagtcactgaatgctattgactaatgtttgaaattatatctatgcataccttcctttacgttatgggtaaatgtttttggaatgtgtttaaacagaacaaggaattggtgaacaaaagaataaagccatgcataaacaaatgtttattcaccgttttcattatatttgtttgtagtactgcaacctaaagtttgtaatgtctgagaatatctgattgtaagcaattaccccaaccccatgtaagttaacagtgttataactggtacgtctccttataggtgaatttgttcaaagttgcttaattatattttaaaaatctcttattttagaaagaactctcaattgctttactctgaataagataatactgtttagaagacaaatcattgcaagttttacatctgtaagtaggttacctgatgaaacggattgaaaaactgaaggcaaatattgaatgttagattattcccaggtatctgacttcatcttcttacttgctaggtgtcattgttaatgataatttaaaaaatcacacatacctacgtatccacatatacaaaacagtaagcagtcatgctattgaattcacaaatatacaccaaaagacaaggggaaaaatataaacaacagctttcttactagcaagcagagtgtggcgtgaggtcaaatttttatgacgaagagcatacatattcacaaagtaatttatctcaacttatgtagctggaaatggagttgatgggttctgaaaaaagcttctagatgacattaaaaaaaggggttcttatgacaaagaaaaaaattacctcaaagtagctttcaaagagatcgaataaagtcatttcatgaaatgcgagactaaaaaacatgccagcatttctaatatttctaatgttttatatgatataaatatgaaatataaaaatatttaatatttttatcatagaaaattaatggcatcaatttcttatcaaaatcatgcatacaattgattatatatatttgctaaagtcctaaaattttgtgtatacatgttggcctaaaatatttttgagggctcacaggcatattttcttttgggaaaatggaaactgcctaatacatgagatgatttatatacatgctgcattttacaagcggttagggaaacacatgtctattttttttctaaatcaaataatccgtgtgtgcaccatgctaccttgaatatcagattatcagatttaccatccctattagggatataaatgttccagaagaacataagagcaaatttttagaaagattaatacagaatctaaagattgaagggataagatgatttacattaaatctgtttccaggatatcctagttgggaaatcaacctaaatacccgaaaacttaaataatccaagacagtatgcatttgcttaacagactttttctccatcatttgtctgtgtttagtaagataaaagaaagacttgcggccgggcgtccgaggcagcgggtcacctgaggccgggagttcaagaccagcctgaccaacatggagaaacatcatctccactaaaaggcggaggttgtggtgagctgagatctggccatcatactccagcctgggcaacaagagtgaaattccatcaaaaaaaaaaaaaaaaaaaaaaaagaaagaaagaaggaaacttgctacccctcagtaaacaagttatatttccttcataactttcttcctataaggcaataaacaaatatttattaagaacctatcatgtgccaagtaaataagtactctgtcaaaacaagttagattcagagtgggctggaatgatttggacagaagggaatgtgagaaaggctagataagatggaaacttttctgccacaggcataccttcccagtagacgaagtagagatacaaataatgtagcgaagggtactatggaataaaaaagtcaataaatttatttatttagtgattacagctacgatttgctaagcaattaatatatgtcagacattaagccaagacctctgcagatgatgccatgtttagatcttataacaacctagtaaatgtgttaggatgatcaaatccattttattttatttaaattaaatagttaattttaatggatagaaaaaattgtttatctttatttcattcaacatgttgttttgaatatatatatatgaatggctcagtcaagctaattaacatatttattacctcacatgcttatttttttgtaggaagaacactttttttttttttttttggagatggagtcttgctccgtctcccaggcaggagtgcagtggcttgatctcggttcactgcaacttctgcctcacaggttcaagcgattctcctgcctcagcctcctgagtagctgggactacagcctcacgccgccacatcctgctaattttttgtgtgttttagtagagacggggtttcactatgttgcccaggctggtcaggaactcctgagctcaggcaatccgcccgcttccgcctcccaaagtactgggattacaggcgtgagccactgcacccagccaagtgaaaaacacttaaaatctactctcttagcaattttcaagagtataatacattgttatgaaccacctgtagaatcaacatgtacaatagatctctcgaacttatttctcctgtctaaatgaaattttgtattctttgatcaatatctctgcaagcctcacaccctcctcccagtctctggtaaccactattctactctctacttctatgagcccaactttttagataccacctataataagcgagatcatatgttatttggctttctgtgcctggcttattgcacttagcaaaacttcctccaggattatccatgttgtcacaaatggtagattttcttctttcatgtctgaattatattccattgtgtgtgtgtgtgaccacattttcattatccattcatttgttgatggacatttaggttgaatccataccttggctattgtgaacaatgctgcaatgaacacgggagtgcacatatcttttcaatataatgatttcatttctttgggatacatactcagtaatgggattgctggatccatactcaatttaaagatatagaaaacaagccataaatatttatgtcccccaatatccaaaagttaatcaatggccaaatcagcttaatttgtctgttttgtttttactatcaaacttaatacattcaccaatgctctttttcatagttgtagccttttcttgaagattataacgtttagtagtttagattgttatgtagacatgtggtgattaaagtaactcctgcaattaatttaactaattttagttatcatgtactacacttttacatactatttccctcaaaaatgttaaaaagcctttcttaaagcctttttagcagtgccttttatatttattcgtgttactgtttcatcaattgctttagtttggtgacagtttcatgtagttcatttactggattcaagttacagtccagttacttgaggggcccaaaagttaaggacttctgaaagtgcgtgaattgcttctactcactgatgcatcccaaacattcagatcttgttacctgaatcaggggttctattctttaaagttccttggaggatactatcagaatgaaaagactcaaaatagaagtcttccggaatacaatgttgtggttttaaacttaaaagtattgccagtacaacgttagtatctactgaggtggtcacactcattccagcaggtcacatactgagaactgcataggctttgtatggtaggccaaaataactttcagattgagtccatcaattatttttctaaaaaaaaaaaaaaaaaaaaaaaaaaaaacccagagtttttgaaaaacctacttagtcatttggaaaaatactatgacattgaaaatcatattcctggaatccctaaacattattaccaaaaccatcggccacagagctgtcttctactttttccccaaccccactaattccgagtgtatctgttcttaatattcaggttatacttaatattccatcttaatattttattttaaacacgttttatgctaaaaatttacacatatatttataatgttctttctttggggatatgaggattctactgctgacctactgctgaagtactaaaaaatagtacttcagtgtgtacagtaatagggttgagcaatttattcatgtcccagccaatttccaagtatccacacacatttcattggcaaagtattcatatccactcatcagagtttgtaatgtaaactgtttctaaagaatattttctcactctttcagaggagaaaatcagtgtattttaaaacataaagctaataaattccatcacacagaaattaacttcaatagggctgtggtttgaaatatgttgtaatccactgaaggaactcaggtaaaactagtaggttagctaatatttattttttatttttatctttaagggacaagatctctctctggcacccaggctgaagtgcagtggcatgatcatagctcactctaaccttgaattcctgggctcagatgattctcccacctgcacctcctgagtagctgggacaagtgcacaccacgccctgctaattttctttttatttttcgtggagacagggtcttgctatgtttcccaagctggtctagaactcctggcctcaagcaatcctcccgcctcagcctcccaaagtgctgggattacaagtgtgatccatcatgcctggtctagctaacatttttcttttttcttatttcataaaattgagactcactttgcatccatagacttatggaaacattttgaatccagatgccgtagccatttttttgtttgttttggtttgtttttcaatatcaatagaatcttttgtaagcaaaagaaagcaaggacttctttaataatttctgatttttatcgtggcatttcctcactctcctcatgccagcatagtccaaagttgctatttgctcaacattattcaggtacttaaatgtttaaacttgatagtttttaatgcatctataaatttaaacataattctggaaagcttcattttctataattaaaagtgataatctatcttattttaaatgtatttctgtcttgggtatcttttcctaattaaaatttaaactcttattttacaatgagacgttacctcatttatttttcattaaacaaataaaaccagacaatccctgaaaaacctatgaagaattatctttttaaaaatataacaaatccatgtgatgaaaactatctttttacatcaccactacacagaaagtttttcatttttttatgtaatcactattaataaaatcatccatgtaggacaataggcaattatcgttaacacctatagcaaagcatagataaagttgattttttgtttttgtttttgttttttttttaagatctcacttctgttgcccaggctggagtgaagtggtgcgatcttggctcactgcaacctctggctcccggggttaagcgattctcccacctcagcctaccgagtagctgggattacaggggtgtgccaccacacccatctaatttttgtatttttagtagagatggggtttcgctataatggccaggctggtctcgaactcctggcctcaagtgatccccctgccttggcctcccaaagtattgagattacaggtgtgagccactgcgccccaccctgacaaagatgattttactttatcttaacctcatcctcataatggggtttgataattacatttcatattttgatcacttaaaattatttttgttagtagcattagtattttgtacatgaggaaaaggtgctatgtaaccatcaaagtacagttctctttctaacggtaaaagtggttgtgcaaaatgtagcagttaatgtctataaataggagacatagaattctatgtttctctcaagaagaatttctgttaaaatataggaaaaatatatcaattcatatttggtatttatgtagattatgttatagtactcctattttacttttgtaatttaataagggaaaactttttaaaatattcattcagtgagtaactttattgagactctacaatacagtgtaagatttatataccaatactacaaccattttactgacagaaaaataaaaatctagaacagtttcagaaatgctgcctttttatgctgttctccccaaagcaggggtccccaaagcaggggtccccaaaccctgggccccagaccaatcggtccgtgacctgttagaaaccagggggaacagcaggaagtgagccccgggcaagcctgagctctgcctcctgtcagataagcagcagcattacattctcataggagcgagaaccctattgtgacctgcgcatgcgagggatctaggttgtgtgctccttatgagaatttaatgataaatgttgtaatgtgcttgaatcattcccaaaccatctccccagcccaagtctgtgaaaaaattgtcttccacgaaaccagtccctggtgctaaaaaggttggggaccacttccctaaagcttagggggtaggtctaaatattttctcaagactcctctaagtaaacacataaaagcataattttaatgaaagcacttgtatattactgcaaatgtgatacctgaacttttgtttgcttgctttcttgtttgttagcttttgagaatacaattgtttttattacttagagagtatacattgaaggaaattataagaattttcatacttgaaagggacaaaagaatatgcaataggaaacagtaaaaaaaaaaaaaaatcatgtcagggctttcaaacctatctgcagaattcctttcaagtttcagtcctttgggggagccttttagctctctgcaccctctccttctgcttatgtgtaagccttggtgatgcatttaccaaacccttcatatctgtaatcatgaggtagcttttctccttcattgtaaatttagggatagtagaaactgccttatttaacattgtatctcttatataaccttacatgtaccatacatacatagagtctatgggataaataaacgtttatacaaattaaacatgagatggatgaagagataaacggatggatggatgaatggatggatgggtgcatggataaataaataaatggttggatgaatatgcttataattatttctatgtaaaatatttttagtgttaatgacccccaaagtgctcttaaagctccaattacctagttaattgcacatagtacaaaattcatagaggtaaacaaaaaagaacgcataaagaaaattgtttctcctattatgttagctagcctcctagttatcctccttctctcttactgggggtgctggcattgcggttttctgtgtattctttcagatatctgctgtacatacatgcgcatagtcatacacatggccacgtatatcagttcaaatctgtcaggaaggtatgagaacatcaatttcctcataccataaaaaacgcagtatactaccaaacttttgatctttgccaatatgattggtgaaaaactatgaaactatgtcttttagtttgcacttatctactcaggaatgaggatgaacatattttcaaatatttaagagcaatttttgttactttttctctgaattctgttcgttttctttgcaagttataatattccttccaaaattgttttataaccagttgacagatgggaaccagtctctaggtggtatcagaaacagtgttatccagcatattcaaacctaccaacttattcgatttatcactatagctaattgtttgagtagttcatacatttatttacactatcaagaaaaacagtttcaacattcttgaccatatttaaaaatgccttttaggctacaaaggtagattgaagagagaagttccaaacagtaatgaaggcctctattccatcccagggaatttgcaaaggctctttcctggacaaacttgtgctattattttgcatgatggaataattttcatccttcaaatctgtttaattgcacatccaaaaaaacaccttctttgactatgaaatccagactagttctctctccttccctggactctctattttaggtactttctatctgaacatcttgtttatttcttcaataacacttattatattgggtgattatgttattttgtcatttatttgctattccctacaatagattggaagttccatgagagtagtttccttgcatgtcttgtttactgttttatcttcactgcttgatccatagtgtggcatgaagtaaacattcaacaaatatgtgcggaaggaataaatgaacatacacatctaatttctggtgtgtttatcaaaaattcaattgtatacttctggtagactgaatttaattcaattgagtttttcccatgtgtgataagaaggatagggaaagggacagatggaggatgagagggtaggagagaagaagagagaaagagatgggagggaggagaatgtagactctccaaggagcctaggctttttactgcatttatttattcacaatttactgcaaatgaatttcacagacacagaaactgcaagcttagacaccatcattgctctgagacaaatgcatccagagtgtatttgaagttcagatataattgatagataaatgtaaagctgggagaaatttattaaaaatgattggtaactcataactttcaaggaagtgaattgtttaaaaaatgtacataatacttgggttagatactgtgtttcttagttaaaatataataatatatgtatttcaatagatcatatatgccaggagacacctgggcgtattgactattacataatagtgattatctttatccatctagtgtttgattgaggacggaggttgatgtatcaaattaaattaattgagatctaagaatgacatcaataaacaaaatgttaagtttcaatcttcctttttgcatatgtactgctttaatctttcggctattgatcaccagttatgtttgcaaagatcacatttaggctttcctttacagagagatttaacttaccctttaaaccatgagtcagtgcttttagttttggggatttagtttccttaaagccctctgagggaaagaagggtatatatagttatatatctccagagaaattgaatatcaaagtctatataacatgtaatttatcaatgattattaactcctgcacttgcctgtgactgcctgtatttggtgatgaagaaaatatagaaaagtagatgattagaatagggaacctaggaaataggaattggaatgtagataatctacagaacaaatggtatcttcttttatttcaattgtcatttgaaaaactttctttgaagagtaaataaaatataacaaatcgggactgaattcagtagaatagactgaatactactaaaacataaaaaataaaagagctaaaaggtaactttaaggtgtagctttatgttcttacatttatggcatgagtgcaaggaaaggctcaacagttacatgcatccatttactttatagttgaatagtaaaaaataatgcagtgaaaagtaatacttcctagggatgttcttagacatgcaacctgatcaaaaaagtataaaacaggttggatagtatctctggaatctcccattaataccaacaatgccttttcatcaaccaacactatttgccatagtcttctcaattctatctggacttcctgattttgatcttttcaagccaatccttttacacactgctctcagacttagtcatctaaagggtctttgatgatctccattgtcttaagttagaagtcctaagcctggcctacaaggttctctattttttgtcattttcctattttgacttatttcctccactctttgactgtcctacttaaactttaaggcagtctccttagacctggaatgctgtttcccactttctcaacctaccaagcttttgaacgtcctttgggacccagacaaaatctgatctttgccgtgatacatttcattaattctctgaggtggaattagtctccctttcctttgattcttctgtagcacctgtaagaacctgtacaatagcaggtatcatattgcatggtaattattttccaaatgtccttctcctcattccaattatgtgtacttcaagggccaggacattgaatcattgtgtgtatcctatgctggaaatatattaagcttccatagagttctcatgtaaattattgtgaaacatttttaatgctatgaagaaagcattttaaatctgtttaagaatacatgttgaccgggtgcagtggctcatgcctgtaatgccagcactttgggaggccaaggcaggcagatcgcttgagcccaggagttcgagaccagcctggacaacatggtgaaacctcatctctgcaaaacccacaaaaattagctgtgtgtggtggtgggcacctgtaattccagctacttgggaggctgaggtgggaggtttcacttgaggcgggaggcagaggttgcagtgaactgagatcacaccactgcaccatctgggcgacagagtgcgaccttgtcacacacacgaaaaaataatacatgttgaaactttgggaaggttttgaagcaagttttgattaaataggacttagatttcaggagtcagttttatcttcaatgcactcaaatttttcagataataaaattatttaatatacagtcatactaataatatagacccttgcaatagataagttggtgtgtatgcgtatgtccaacagaggattcctacagtcacatatattttagccataaaataggaaatctaaataagcacctttgtcttagacttcagcacaataggtcgaaccttcatttgaatgtgactagggactgccaagtccctactgcctatctctaccaaaggctgatctggaagtgaacccttttctttctttttttttttttttctagcagatgaatgttattgagtttatctgtggtctagtgatgatacctgcagagcagcttcatttttcagagtcattcagaaagctatcataagcttcttccttcttgtcaggcagagcaaatcctggcatgacaggatgtactgggagtctccgatagtgggaactgacaaagatgtgccttcagcactcccacaaagccatattgtctttctggaaatgaggaggatttattcagcaaatctaagtgtaaactaggagacccatcagataaaatccatacaacaaagatcaccaaccattttttcttcttctgaatagagccagaagatgcaatttaccttcttctctttttttccccagaagtgacaatatagagttagagagaaattatagagcggagattttgaaattcagtttcctccccaactaccagttgaaaaagcatagccttaggaaatgttctcatttgatttcctatgttttataacatgttatgtttgtgaatttgtgtgtgatgtgtggtggtggtggttccaaaatatctaagatatatagtaaatgagcaaacaaaaatagtttgtagcttttgatatatcatagttgtacatattttcgtgttacatgttgtattagttcatttttacacagctataaagaactacctgagactgggtgatttataaagaaaagaggtttaattgactcaaagttccacatgactggggaggcctcaggacgctgacaatcttggcagaaggtgaaggggaggcaaggcacatcttacatggtggcaggagctgggggatgtgggggggggggaagtgccacacttttaaaccatcagatctcgtgagaactcactcactatcacaagaaaagtctgagggaaatctgctcccatgatccagtcatctcccaccaggtccctcccctgacacaaggagattactatttggcattagatttgggtggggacacagagccaaagtatatcacatgtaatattttaatcatgtatatactgtataaatgatcaaatcagagtaattgggatatccatcatctcaatccttcctttctttgtgatgggatcattataattattctcttctagctattttgaaatatacaatgaattattgtttattatactaccatatactagaaaaaatgctctttaaacctcatcagaacacttgctaaattgtctttctatatgcttatgacaacagtaaaaaacaaagatcacatgtccaatattactgggctgtgcttggaaaaaaatattttactcttttttaaactttagccaattatatcttcaatagatatcaacactaatatcacatctttaaaaagtttctatgggttttagtaaggtatataaaaccatcaaatatattatccagagagacaatatattgacatttaaaatatgttcttactcatttatggtatcacctactgtcagaggtaaagtaaatttaatgatgtctaaagggattacagttgcttaaattggctagagttttatatgatttatattttcattcttttctggacattggaatcaagtagtaaattttgaaattttatattatatttttacttatcctgtttacagtatcacacctgactcaatttagagtagaaaatatttctagttacccttcgtcagaatataaacatcttttcaaattcatttcagcattttaattgtgttaatagaaatagttcaaaaatatagcataaacctcagcatgttctattttggagagaaggaggacaatgattgttgactctgatggatagtttcccaatgtgaaaagagtaaatttttcttcataataatattttatttcatttcatatggtactctaaaataggcaaaatatacctttacctctcttctgaatactagaagtagaagtaaatgattttattattgacattattaattatactatatttatgttgatatgatgccttacagttcatcaatcattttcatatattttaattcatttggccctaatagctgtgaccacctcccagaatagcccagtcaaaagaggttgaaaagaaaaatcatacaaaatacccatgaagtttaagaatttatggcacttgaaatatttgcccttagacaatgttcttagtatttctgagcctcagtttttaatacatgaataagaatactttaagtattattcttccacataatgggaataagaatacttactccatgaaatgagaataagaagacttactttatgtagctactgagggagtcaagtgaggaacaattactaatgccatgacacagtgtagatgctcaatactcatcattcagtttccccttttgaacttaaggccagaaagaagtgacttcagtggtggtactaaggagagagggggtgatttagccttcgcttaacattcatcagacctcacaccaagccacaggaagcaaatatacaatctctgaaaatagggaaacctacattcaagacaaatcctgtgtgtacctcctccccttcctctcccagaaaagatggctatgtctgaatcacaaaatgtaagcggtcgcctaaaaattcagaaatcaggataaattatattttacctcattttaacaattaaaatcaatgcaaaataattcatatgagcaaaatattaaaattttaagagaatacaagatgtaatcttgcattcgtgccactcatgttctctggcctcatccttatctccacttaaccaccaactgaaggactagaaagttggcaatgacataaagcacagcttcctcatgccatcttcccatgtccccccaactttgggatagtaaacattgcctgaatttataatcctgtaatatttttaaatgttttatcagatacatatgtttcaacaatatttgttccagtttagtgtagcaggtaagactgtgggtttcagagcatttccacctggatttgaattctgtctacactaattactggatatctgaccttgggaatgttactgaagttctctgagcctcagttttctcatccaaaaaaaaaatggggacaataatagtaaatatgtcatagggctattgtgaacatatgtgagaacattaaaaatatttactgtatgacacaaaatgttttagtttgtttttatatttaaatgttattaaaaagatatttgggactcatattttcctcatgcatcatcccatccctagaatttatcttgattgttttgtgtagcagtcgtttctttgactactatgtaatcaggttaactgtccattttcctgccagagggcatttgggctgctcgaagatttttcgtttattgtgttattttgggcagtgctgctaggaacattctcctcatgtttccttttgcaaatgcctctctgtttttgatgttgcagatggattttaccttgccatggcatgaaatccaaaggctgtacccacagattccgatatttatctcttgcttgtccacacctagtaataaactttagccaaagcaaactgttgcttgttactatgagcctaaagtcgctgtgctggtccctcctgaatccttttctatgagtcgcttagtactcttgctctcaagctctggtctgtaccgagctgacagctttttttatttctaggactttattgctgttttaaagtctttccactctgaatctgtacctattcaccccagagttagttgcatttctctgtgtctctaacctgagggtcatgagtctgactttgctcagtgaaggcaaatattttcttcctctgcagtctgtgttcattttgataatgatgcttgatggggggactaagcatccccctgagaggaaagaatctcgtttggattgtaatttgtcacagtttgtcttagtttggatttctttaaaagctaagcctgaggcgaggactagagagcaactagctcatttggtagctgatcacagggagcacaagtgggaggcaggggaagtaaggaaaaacgggggaaaacaatagtgagtgtattattcagctggctactgcagtgggaaactgttgttcaatcctgtgaagacccctctgaggaatgctgtagaatgtactcataattgtccctctgaagaataagaggctggggaatatgtctctggttcctgtgcctcattaattatttctcagggacatcaggtcccctcctgtgtgttggatgagtgagtttctataactttggacaaagtcgtgaggctgaaacacagagaagcagtgggtgcttgacctggtgggctgttagcatgcccgagactctccattacagggctgatcaagccagaggtaaaccaacagagtgggcagtgtctgctacacagttccaactggatttcccaattacctagtgctatggtcttctttgacaacgtgtctcaagaaggtaacctgtagctctagcccactgctactgaatgtttcatacctggtatcatgtggattataactgtagtatttcatttttcaggtattgtagtatcgaaaagccctatagcctgttttccttagtataaattttgattaaattatgcaagtccactttaaattcacagtttgatgttatgtacttaggaggcactcaataaatagttcttaaagcaataatttttaaatgactttttgtattatgtagacacatattaactataatagagcccttcggcaggaaaactgtttcttcaaagttgcaaagtgactgacaacgatatatataactagaagcttcaagaaaaatgttaccaggggccacttttaaactagggggaaaatcgtttttcacaataagctatcccatctcctccctactgaagcctctgatctgctatgattattaaaccctcatcttttagtgcaagaaacccagcaagctgaaagggaaatgcttttcagatttaaaaaacaaaaacaaaaacaaaaataaacttaatttcttttaggttgatgttgttatactaacttgccaatcagttaaacatgtatctgtcttttaaaaatatcttattacataagaacaaaagattttaagacatacagtttcaatcataaccaaatgtgtttattacttcgaattttccacagtaacttgaagccatctatgtacccatctccaattccatcgcttccccactaccaccagagataacggtggtcgtgaaatttgctttgttttatagtcttgctacatatatatgtattactaaaagagaaatagtcttgctctgcatgcttttgaacttcgtatagttggaatcatattgcatttattcttctgtgactgtttctttcaatcagcattatgttgctaagattcatccatgtctgtgactgcagcattatgtcatattccgtcatagaaataacccacaatttatttatgcatactactgttgatggatactagggtcgtttccagttttaattcttttcctattacaaacaaggttccttgtatacatgtaggagtgggattgctgggtcacagggcccatgtatgtgccctctggtatactctttggctcctttacactgctctactgtgtaccactgggagactgacctttgtagactgtgtgtgccaggcttccatttccaggtgacttccagctctctttggctgatggtgaaggattggaaactcagggaagacacaagagtgcttctcttcctctctttgtgtttcaggcagtatctttggcaacagctgcatatgctttgatgtcccccctccaaccagataggcccactatagctgcagcttccaatgaatgatctcataacctcattcactgaattcatgcaccctgccttcttctttcctcctcctccccattccttctcctcttcctcctccccatcctcctccttctctctctctctctctctctctctctccccttctctcccactcttcttctctcctctcccttcctctccctgtactttaagggtaatagtggcttcctgtggttgctaaactctgagtcactttgtcctccacagcttgtcaactctgttcttctctcatttgtttcaattctataatttaagctttctgatttaaatatcaaatgactttttgtgtctgcttagattctgactgacatgatgtatttctaagtttccaagattatgccaaattatttttaaaattggttacaccaatttaaattctcacgaacttaaaaattctgcttgctcccaaattctaacacttgacaatgtcaaacttaacttttggctactctgttgagtataaaattgtttctagctgtggatttactttgaattgcattaatgaaaaatgagtttgggcattttttcatggttccattggcaagttttaaatgcagacaattgtttagaatacattatttttatttaataaaactcattattaaatgtatattcctttaaggctgtactttgatttagtgtaagtagtacacaatttacctcagttttccgttttatgtattcactcatttaatttagcagatatgaattaagttctacaatatactatacagagtttaatgtgaaagtaagaaatcagaacatgttatggctaggataacttgggagcacagccttttgaaactggtttagtgttaggatacacatttttgtgtttacctctctttcccaccgccagtttcaccatcattcataagatcaatgactgtggtacattacaaatataatgtgaaattgtttacaagatttagtattgttcaatcattttgcaggcactatcatggaccttcagtgtcaataaaggattcagaggttccagaaaattctaggctatatcatgccttgagaagtcctatctaataaatatatagaccacttttagagtgtaaaggaattcgtaaaatgtgtcagcttaaaatattgaaatagcgagggtgacttttcctttccaaactgttgatgaagactgcagacagggataaacattagctctgtgtggacaggatagtgtctgttgtctgagattctggtcatactggtttaatacccataattgaaagagctctaagacatggctttgtggagaaagaaagatactacttgagagaaagcaagttcatatttccttttactaataagtgttcagattcctaaaatactgtaacagtaaaaagatattttgaaactttctaagaaagtgtgttctagggcggggcgcggtggctcactcctgtaatcccagcactttggggggccgaggcaggcggatcacgaggtcaggatttcgagaccagcctggccaacatagtgaaaccccgtctctactaaaaatgcacacacagaaaaattagccaggcatggcggcgggcacctggaatcccagctactcaggaggctgaggcaggagaatcgcttggcaggagaattgggaggcggaggttgcagtgagcccagatcacaccattgcactccagcccgggtgacagtgtgagactctatctaaaaaaaataaaagaaaaagaaattgcattctaggggtgaacatccacatgtacctgggatcaatccttccacagtcatatcttcacatcataattctaaccctaaatcatcaagaaaatattatgttagacataccatacataagaagggaaagagagctgtcctacataatcattttcatgtaaacctttcatccagaagttgaggtgttctgtcatccaaaggagtagctctcagctgtctggaaaacctttttgttcagaaggacatttgttgtgctttggtttaccttgggttttattgtgccgcgtgtgtgtgtgtgcaattctcattctattaaattattgtgtgattttgatacatttatgtcagggattagaaattttagaaatagattatttctggttttctgatcaatgtgtcctgtctatgtattttgtctttgtgcaaaggaataagactaaaacacaagttatatgcctgagtctacaactgagtgttgtaaaccaaaattccaaatgaaagaaagatatggggtggatggcaggattagagaattgaaagagtgaagaacaaaaggcttgcagacatcagtaaaatatgctttcttagttaaaaatagtaagaatgttttggaatattttacattaatttcgtttcccactttttctttacttttgcacaattaatgatttagtttttgagtttcaaatatttggccaagcttatctactgattgaattcaatttcttactggatgtgtgtactgcttttttgttgcattcatggcataaattttgtggacgcatttctacaaaaaccgtggattcagcatgttgcagagtactatggcaagaaaactgagtaacagactaagctgagacttggtagaaaatatctgttctcctacaaggcttgactctctactgttacttcaagaaaatattatgttaactatatgtgttatacttaagaaggcagaaggatactcactcctctgacgtggcgagatactcctcattacccccacggaaatactatctagattgtgaactcatccatagaatgactacatatgattcattttgtgatttccctaatatgtattgagtttaaactacattgaattccctggagtttgactagaaggttgattatccagtagagtttcttgtaagaaattcttatagcagtgaactattctttatggcagataaatcctacctgtgtatactgattttctttcttagtaccatagttatactcaggttactttttttttttttttttttttttgctcatatagacaagactacataatcctttttagaaagggccaatatcctatttggaataaaaacaaaacagttagatggtaccagggtcaccttaaattaacttatcagactatcaaccaaatcgaaatatgatttcagatgtaattaacccatttgcctagtgagatgcaaaggtgtgaggatttcttgaacacatctttctcttatgtagcaaatatcaacctcctgataccttttgtagtcagttcacataccatgacaatacatcctaaattttcaggtgtgatctaaccagcataggttcacataattggcatgacacggaatttttaaaatatcaactacctcaggaactttattcatgtgaatctggaagatcctttttggtatttgagccctttcatagattcagatgtcaaagtatttttagaatgggtctgtaaggcatcattattttgtaattataatcttattgattgacagcaaatgctgtgttccatgaaaatgttgcattgaagtgatcccggttagtgctaaagacagactgcttagatctaaagtctcatgagaagaaagaaagaacttaaaatcattttaaattcaccaatatgacgatacaggatctctcataaaatgctgaaaggttgtttttgctgccagacttttagcacttccgttttacgttcaaatgttgtaaaggttgattactcataagttaaaatgtttggtgcaaaatgtactttaaaaatattttcagtgttttttggaaattgtagacatttgattttgaaaagtaggccagaaatttggaagactacaagccatatgatggctgatatttcccatggaaaatataatatgcagctgtgctctgctgcatggtagaacaggagattaaaatatgagaaattataataccgtttgatgatgatattaatgtcactgaatcaaataaagtatgtgatatatcataagttaatagaacaacacttaattattgattagagcctacatcacattttaaattatcggcatgtttggtcttgcaaagggtcaagggtgactcgtagcaacagaactattctcctttcaaaaagttagcagaaagttaatatcaaattctatgaggtagagagggatttgggctgaggtaggtcaggaggaacgtaaagagatgtgtcatgtgtagatttgtgagctgtgggcacctgattttgtgtttaacagtatttacgaccaagataagtgaatgaagagctatgttcttatgaaccttaagtttattttgctaaaataagtaagaaaattcaaattcaaattaagctatatagtcttgcaaatttcaggtctctgaggggtgtgcattaataagtattcaaaagtattttgtcatttaattactattatatgaatttttatgtaattgaattattcttgaatgttgagaaactgtctttactaggctaaaaattcccttagtgatctcgttacccaattcctttgtgttccactctcagtgtctgaattgtcaccaatatgtggagtccaaattatgaaatacaaagctttaccagaattctgatgattttgaaggaagaaaattacagcaaattttgatcaattctctcctattagtgattaattcaatgaaccgcttgaatttcttatttcctcgtagaactgtatgtacatgaaggatagatacaatatttagtacaatctatagtgagatatgaagggaaggagattatgagaaaagaataaaactttattataaaaatgcttgttcataaagatttgacacaaaatcaatatgataagttttcagaaaatcaaacaatgaatttcgtatgaaacctcacattggcaaagcagttatgtgaataccaatattttttaaatctaaaacaaagcattttgaagtagtttcatgaataatgtactgaacctgtttcacgcaatgaaatgaacatcacagtgagaaaattattccacaattgtaaagttaagtgaagcttgcattataaggccaataatactcaatagggtattttctcatgaatttacactatagaatgtttttattctggaatttggatgatatcatagtcattcaacaaatacagagactaagtgatttttaaaatctttcaggaaattagttctttaatttcatctacatgtatgtaaaataaccaaacctatgtcttatgcatataatgtcattctaatatattgttcatgatcataatatttatatagaatccattttgcttggccgattgatttggcttggcctacaaattagtacagtccctctcaactttgacacttctgtgtaccatcagctccttcctggagtactgaaatagcatcctaactgctctctctcatgtagtcttgaccccatctataaatcctaatttcagcatttggagcaaccttttagaaagatcaattaaatcatctcacctcttcattaaaacgcctctcattctaccaagagtaaattccaaaccttttaaccttgacctacataactggaccatgcctccctcgcccatttcaattcagctttgctcttgtagctccaggcaagctagctctgtcttagttcttgcatgtaataagctttcaagtccctcggtgtctacttatttactgttccctctgtattagtccattctggcattgctgtaaagaaatacctgacactggataatttataaagaaaagacgtttagttggttcacggttctgcaggctgttcaggaagcatagcagcttctgcttctggggcggcctcaggaagcttctaatcatggcagaaggcagacggggagcgaggtgactcagacggtgggagcaagggcaagagagacagcaagtggggaggtgctgcacacttttaaacaaccagatctcgtgagagcccactatcgcgagaacagcatcaaggggatggtgctacaccattaatgagaaacaccgtgatccaatcacctgccaccaggccccacctctaacattagggattacaattcaacatgagatttcgtggggacatgaatttaaaccatatcactatctgactggaatgtgctttgctcctgcttctacttccgttttctgagcaatcagacagttattcattaactcattcattcattcactcactcatttgttcatttatgtattaaattattcagtgattctcaactctgggtggttttgccgtccaggggttatttcaccatgtccggagagattcctagtggcataactaaaagaagagatgtttgctactggtgtctagtgggtagagaccagggatgttgctaaacatgtaataatgttcaggtcaacccaccataataaagaatcatcttgtgcaaaatctcagtagcaccaagattgagaatctctgcaatacgtcaacaacccttctaggtgccaggaatatgacagtgaaccaaatgaatatggtctaaactttcacaaactaatccattaaggagaagatagtcaataagctggctaacaaacaattaaatgtatactttcaaattatgttgggtgctctcatggacaaggggacaagagagtggccagtgaaacctaatttagagcaggtggtgttgggggaggtggtgtttatgctaagacccaaagaatgaaagaaagactcagccccaacttatatatatagtaaacatttattgaatatcaatagcaaaaagttgcatttttctcaaccatgtctttttatggtaactggaaattgttcaaattattttttagaatcttttaatcatagattctttgctaaggggattagtctagcatttttctcttgtgagcaattaagttctcaccaagttagtgaatcctatgtcttatgtacttcctacttattactatgaaattatctaaaaaatgctcatagggttcctaatgtagttgaaaagcaaactgttgctgcatctctaatcagtaacaaaacttgtatttctgtcgcaaaataatgtaaaattttatagtactttttacatatttatttaaaacaattttaagtaagattgtttctttgtggaaggtcatatggtcccaatatagggatgtgtacagaaatacatatatacatacaacaacacaatgttaaacctagcaaaagagtggagtctctttcttttatttttcttactttttgagcaacgagacaagcaacatattatgcctagtcacttgaatcatacaccattaaaacattatgggctgagtgcagtggctcatgcctgtaatcccagcactttggaaggccaaggcaggtggattacctgaggtcaggagttcaagaccagcctggccaacatggtgaaaccctgtctctaccaaaaatacaaaaattagccgggcgtgtggtggtggatgcctgtaatcccagctacttgggaggctgaggcaggagaattgcttgagcccgggaggcggaggttgcagtgagcagagatccgccattgcactccagcctgggtgacagagcgagactccatctccaaaaaaagaaaagaaaatatgaaaagaaccatttttaatgtcaactactgctttgatgctaatgtctgtcagttcagtgtctatgacttaccctttattctgctcaaaaccttcttgaattttccatttgaatatcccacaggctcttgaccccacttatccaaaattaaacctatcttcctctctactacacctcttcttataatctttctcttgctatttctaaacatttagtgggccaaataaataccctaggagacatgacttgaaaggggtatgaagtttagataatgttcggcttcttgatctgatactggttaaatgggtgcattacatttgtgaaaacttattgagtcacttatgacttacagattttctctatatattttatattttaagaaaaaagattacatataaattctagaagccaagctacacctttccctcttattcatccagcacatttactgagacagctagattttcataatgactgtccattgttgaatatttgctatatctttgatattgttatccattattaacttccttacctggtttgacagttgaaaatttctgtggtgcagctattattatttccatttcacatatgagcaaaaagagacttagagtggttaagtaacttgtctaagttcacacaacaacaaagtggcaggagtagagtttgaattcgagtcaatatttataatcactatgatatcttgcttctcgtgttccagtcgcattaaaactatgaatgccactcccactccttatccatccttactacctggcttcactttagatcttcaggtcttctttcctatattataatgataatatcataagaaatccagtgcagtttagtctattccaaaatcagtctaaatactgccaggattagtgttcattccacaatataaatctgattgtgtagtttacttaaaatccattaacacagccgttagcaaccttagctacatgtgaaaatcaccaggctccacccaagataaattaaatcagaatctctgggtatgagggactgggagtgagcattttaagaaagctccctgggtaactgtaatgctcagctaggcttggaaaccaatgctttaacgtttccctacagcttttattataaaaataaacccctcagcattgcacaaaatgccctttgtaatttggtttttgccttcctctacctcgcctcctctgctgtaattcccttcttctcccactttttccccaccctacctacatacatttcattgcaattattcaaaagtctttgtttcttctgaagagttatgatttttataccatacccttacacataccagtcttcccctctaaatgcttagttacattatctttgtacttaatccttttagttgctgataataaatgaaaatttctttttagtttctttttttttttttttttttttgagactgagtctcactctgtcgcccaggctgggctgcaacctgggctgcaacctccgcctcccgggttcaagggattctcttgcctcagcctcctgagtagctgggactacaggcatgagccaccaagcccagctaatttttgtatttttagtagagatggggtttcatcatgttggccaggctggtctcaaactcctgacctcgggtgatccacccgccttggcctcccaaagtgctgggattacaggtgtgaaccaccgcacctggccaaatttctttatagtttcttgacttgtttttaatttagaaaatttcccacgtatatagacaccatacaatttataatgtaaagctgttttcctatatcaatcatgttttaccttttttctctttctcctatatatgctgcttcctggaagatctaggagctgacaagtgtctttttatcttgctttgcaaatctaatcttttgccatttctttttatagaaatgaaagcttgtatcatgcatactaaagatggcttcttctttgggctgtagggccatttaatgagttatattgaactgaatgctttataagagttcaaattagtacattgggatactcctatgccagggatggattaatatatctgtccacatatatacacaaaaatgtgtgttgctaatttccaaattagagaatacttattttgaattatcagtatctatgacatattttgcatgtggtatatatttggttaattaaactgagttaccacttgttttatcaaaatttggtgtctttctaaatatatcatgaatatttttcttctaatgcacctcgctttctgctggaactatagaaacactttgtaaatttttacttgtgaccactcgaacatttacaggacattttacctgaaaattttttctgagtcagtgaagaaaatgtccatgtttctgcgtgtgtgtgtgtgtgtgtgtgtgtgtgtgtgtgtgtgtttgtgtgtgtgtgatgcttgcttatgaggaatttattttggctatggttctttattttgctattgcactcttaacattcgtatgatatgtattattaccctataaatacttacacaatatattcttacaaaaattaatacaaagattggccaaaatgtaatagcatatgtttttgtaaatagaatatccatatacagtcataataaaactgaagagcgattttatacttttccataaagccaaagattaagggtgtaatcactgcttataatttactaggaaactataaaacagataaaagtagatgaaaggatattacaaatatctcaataagtcgtcctccgcaactgaccccttgctttacacatgttcagacactctatactaaactctgtttatttttctattttataattttctatatgatcgtaattcagcgttttcctataatattattagtagtgctaccaacagatattacattttatgaaaaattttaaaaagggcacatgttgcataaaactaggttttgaaacagctgcttataatgctgatatttagcacatgactaggtggaatatggactttttaatgaatattttttcaaagttaggtaatttctcatcagtcagtttcaaaagcaaagttaaaatttgtgtttcaaaaaactgggtatgtttgaaaattgtatttaataatggattttgagagttctcaatagcaaattgcttggctgactgtagtttaagaagtaataattttgaagagaagttgaatgcaggtactttcaaagtgttgaaatttttaaagaagaaaattaaccttttcagactgtacacttgttcatcttttatattcttttccctttaaaaaagaattgtagtaagaagggagattaccttctgtcattgatacaaattttccacagtataaatgctgtttatcacatttgtataatatacacttcctatcaattttaaaaattacatgttactactatttaactctgacttaattattttaaatataaaataattcattcttttataaataatcaaaactatagttttacttttctttcaaaatataccactgactacattacagattagattttttttagtataccaaacatattttcatcttttggagttattggaagagtagctgcttactgccttacattttagatttctctatataacaagcattttcatcattttggcttattcgagtaattcttaataaataataatacaatatttacaaatgagatgtcatttgcaattttaacacttcataattttaacaaaatatctttactttgagttttttactttccttttggtgtgacattttgacctccaatgtgatcttcatttaaaggaaatatcaacgaaaattccttttttttcatttgctatagatgtacatataagatttacatgtgtaaggaatatagagcaataatgaattgagctattcctcataatcacttcacttaagaaatagggggctgggtgtggtggcttgtgcttgtaatcccagagttttgggaggctgaggtggtaggattgcttgtgtccaggagtttgagtccagcctaaccaacatatcaagacattaagtctatgaaaaaattaaaaaattatctgggcatagtggcatgcacctatagtcctagctactcaggaggctgaggcagttgaatggcttgagcccagaaattcaaggttagactgagagctatgatagtgccactaaacttcagcctgggaaacagagtgagggcccttctcttaaagaaaaattgactagaatatgactaatactctagaagccctcctccacatgccacccttcccaaatgcaccactattctctcttcccaattttcatttttgtatttattattcctattcataccaacacaattttaccagatgtgtatgtattttcagcaaatatttttagtttattatgcacttaattgacactatggaagaacagcttttaagatattattccaacttagggaattttaaggaaataagacctttgtatataaaaagttaaataggaataccgatttgcttttgattagtgttaaatcacataagtttaaatttgtaggagatcatagagatcagaaagcccagtggttcacaaactttcttttttttatcaacaaaacctcttttaaaaatatatagcataaggaagacggaaccataaaactgaaattacagcagctcaactgaattgtgagtttcaactgaactcaatttcaaacccacaaataagtcaaactcttactttactgagaatatatttggaccacacagagtttaaaaaacatgtttaaatttatttagcttatttataccagaaccaatataagaatccataacattctgcattagaattaagtacaaacactttttctttctttctttttctttttctttcttttttttttttttttgagacggagtcttgctctgttgtccaggctggagtgcagtgacgcgatctcggctcactgcaacctctgcctcccaggttcaagtgattcttctgcctcagcctcctgagtagctgggactacaggcacgtgccaccacgaccagctaatttttgtatttttagtagcgacggggtttcaccatgttggtcaggatggtctcgatctcttgatctcgtgatccgcccgcctcagcctcccaaagtgctgtgattgcaggcgtgagccaccgcacccggccgtagaattaagtacaaacactttctatgatattatactaaattaaaaacaggaactcaaaatgatacaaactgaactgaaataaaataaaataatacagtgaatggagtccacaattaaaatacctgcaaggacctgaaagggaatggaaataggtgaagcaaagatctaaatgcatacggacattgtgtaaattggaaagaatactggcaaatggcacgcctgtgcccagtctaaaatgggcaactgctaatcaattcagtctagcagtgtccatgtcagaatgtagagctatttttggccatatattttatttttcaagaggaacttaagaatctggagttgtatgtaaaacatcccagtgcactatatatttgcctcataagttgagcacttttttttatgtgtgcatgttgtctactggtgaatcccaagcacttggaacagtgcctgatatatagtaggcagtgatgtatatttggtgggtaactggaaaaaggttttccaattaaaaattctgtgcaagcctgaggtaggagttgggcaggacttatttcccattcccagaggataaagtgaagaaactggcaggtaccagcaggcagcgaccaacggaagtgagaaaaacagcagaaaccagcagatggcaacaaaagtgatccccagcagccctcattgcatattagcagaagccactcccaccagcaccatgacagtttacaaaggacatggcaataacccagaagttaccacccctttcctagaaagttctaaataacctgtctctcaatttgcattaatctgccacttaatttacatgtaattgaaagtgggtataaatggatataaatacagtagccagcagcccataccctgccaactttggaggcactgcctatgagttgtccctatttcacaaagcgcagtaatgttcactaaaacatagctgtttaacgccactggctcgcccttgaattctttcctaggcaaagccaagaatcctcccaggccaagccctgattttggggcttaacctgtcctgtatcaaactagccaaatgtatctcaggcctgaattagatcaatggctaccagttcaaatcttttgttttagatattagagaggcaggaagtgactctctactgtgtagcatgatactcagagcccaggaacttcttcagaatcccagtttgacttccaaaacgccagtgtcttgcttttatttactcttgtgggtggcagtaagggaagggagcatatctccttagcaaaacatctcatcagaacacggtccatagcacaaattattaattaaagacttacgtggaggctcaaatatagagccaaagcataaccatttaacaattatccttcaaagcaattttattcttggcttttggtggaaaaaactcttaaaaataaaatgataattctacatatgggatttgtgatgctatttagcaaggatatgctttattgcctgacatcccctttattttggcagaatactatgagattctcattacgtttccatttgctgcggaaagtggagaaaagttcagagggggaagactaattaaaaaaatggttgtctactaatccattgaactaaggcttcttaacagtcatgctcttcttaatagtatgaacacacattttgtattgattgcagagaataaagaaaaagaaatgacttgttttgaacttcaaaatggaaaaaatgaatacaaaatccagataagcctttgggcataccaactttttcgacttgtattatataacaacagttggcaaatgatttcaagttgctaaagcatagaaaatgatatttatttgatgaaagctaataaatcagacagaacaattaatggataatttggattgaacaagtatgaaagattccaccaataagaaccctcctacctaaaactatgaggtttttaaatgaaagactctcctaatgtcatagattttctctacctgtgctttatctgaaaataaaaatcacagcttttcccttcacctcttcattctctactcctccttatatttcccctttccttcttccttccttctccttcctttactctttgttctttttattcctgtttgttctgattacctgtgatgttttctaaaaacattaaaattttggtcaccattaatattttttacaatgaattaagaaatttatctcagaaactggatttgaaccaaagccttgttttgaacttctaataagtagactgaggaacaagcacgattttaagggcatatttaataggcaaaataaaaaaaacgcataaaatgcccagtcgttgatgaaaaaaatatatttttgtaattgctgttattcaggtgcttgaaggcccatgttaaagtatcactggagaagataaaaagcatacttcctcaatgtgaaaaccctcaaaagaaagggctataaacactttgtcctgaatatttgttgtttcaattgctgacgtttaacttttcatctgacagcaattcaagttctgcgtaccacagtgttgttgaatctttgaatctgaaaaatattttccttgcagctgtgataataatgtatctcctgataatgcatttaatgtggcaaagacacttttcttaaacacagtgaaaactaagtgttcattttgtcattgtaaaatgagacatgtttagttgctccaaattttaacttgggtaaccttgagacatagttgcacatttaacatcctatattttgcttgtcttgcagtcaagtgaattatcttagttactggagtgttacgtgacaccaattgttttgttaccactgctttaaaaatagctctatccctagaccccatcagtagtgtgtcttttagggccccgatttttttctaatctataggttagccctcaaggcaacgtggcctctttctgtttacttctcattattcctgtaattccaattctacatgtgactctttgctttattttaaaacagttgtgcattgctgatgagccttgaagtcaccaggggtggctggtgtcaatagtgagtctgtacatggctatttttatccataaagcagtttactttctgtatgatgaaaggcgttaaagtaaaacctgcctcctattataccctaggggtgtaatcaagagggatttgatcatagcataccaattaagcaggctacagcagactgctctgggttgtactaaggagtagggtgttctccacagatttttgaaccctttattgcaaaagcatcagggcacagcacatctaattcttttcatcgcacagctgtgtacataaacctctgtatacagtttctgctcagaggctgtgctcttagatttaatttttcttataagtcattacagccgtgatcattcatttaaacctcggcaagataagcattactagttcccagtaaactagatgatctcttcctctagactgtattttctcttatgaacaattataagattacaagactagcaatgttgcttatttacactacactacacacacacacacacacacacacacacacacgttcattccaagccagcagccagctcagcatccttgaaagctctcaacctcagccgaatatataaatatcagaattctctctaccaccctcaattagaaaatgttccagttctgcttttaaacttccactccaattcttcttgctaaggcctggaagcctcaaggtttcttgtattgccttatatacacctggattattcctctctgttgaaaactatgtcccattggaatgggagtgtctgaccagctggtgcccaagaatgctctcagaaaacgatcttccacaagccagagccaaaacccaaacccttgacccttatcaaccttgacgcccaaaactccaggtgtggattagcacagtaacccgcaaacccactcctacacgaaggaagatttttctagaacaactacagctctccttttatatttttgggtaattcagttatgatgaactgaaccagaagtataaagtatttgctcagttcagttcttaatctttgtcatggtattacaatactaaaccacttgctttgtcactttcatatagctcataaaagaaaatattactgtataaaatagattctgtagtccttcacttgttgttatggactgactattcgtgtttgccccaaattcatatgctgaagccctaacccccaatgggacgatatttggagatggaacctttgggaattaattagggtaagataagcacatgcaggtggggctctgatccggtggcccgtgtaaagaaaacaccagagagcttgctcttgctttgccatgtgaggacacaggagaaggttgttgtttacatatcaggaggagagccctctccagaacttgaacacgctggaacactgacctcggacttaaagcctccagaactgtgagaaaataaatttctgttgtttaagctgcccagtctatggtatcttgttacagcaggctgaaatgagtaagacacttgtattgtccctgcggttgacatctgactctgtaaaaacacccatgcatacacacacgtacacacaaaacaacaacataaccagtaagataggtaatcaagtatatggtaaatgcacctgattgcaataatgtgcgcatacccttagaatgaccctgtactgcagacacacctgaatgtgttttccgagctacggaatctgggagtagcccagcaagagagcccttccttgtctatgaggaacatctgagccccaagtgcatcccgtggaacacgggccatacatacagcggattgaggccccgagttttgggttggatgaaggttgccaggtgaacgtcattaagggcagagggttaagtaaaaatgctatataaactgcatgctgcccgcaagcagcgttggtttgcccgctcatcccaccgccgccatcactaccactgtgctgcgaggctatcttgtccagtctgccaccactggatcgtttctacaggtaaggcacttctcctgtccagcccaccactactgaattccctcccctgtatgtaaacctctaataaaacccaatgcctcgtttgctggctatgggtttcttcctcagtctcttgaacctgatgccttcgctattgagggttataggggttcagtacaacatcatgatgtgaacaaacgcgtttatttgggcagatgtattggtcagctctcaaaacaataatatcaagtaataatcattacctccaacttaatggttttaaatagcattaattctcatggtcatgcggggtttggctgacctaagttgatctagatttggttctgcatcaggctggtagttgctaggcttggctttcagcggcaggtttggtttggatttctttgatgtgtcacgtccagaggcacacactggaatggcaccggccacccagtgcatgttttcataggttgtcactagatagcaagcccaaacatgccagcccatctcaaggctctgctcctgtcatgttttcttaacaccccgttgaccaaaggctatcacatttcccaccataggctagatatgccatcctattaagtaggaatgagaaagtggggaccaataaatcaacctacagtaggaaaagtaggggattatttagtagcacaaacagatgagtttcagtgggcttgctgcttttttgtggatatggaagaaatacctaaaaaaaaaaatttccagctccactacaatatttaagaaaaaacttaggtgtgttcatagtttactactttgcttaataaccccactgtttatcacagcaaatttaatcacctctgaggggttttaatggctttgataagacaaagagtaaattactgaggaggaagacggtcactttcacatcctgagagatgctaactgtgcaaggtaattcacatatatcttgtaaacatgtttgcaaacatatataggagataggtggtattctcattttttaaggaaagaaatggaagacatgagagaatgagtaatatgtttaagaggacacagctggaaactggtataatctggctctaaatacgggcttttgtgttacattgaacagagataaattcagcttatgttaaggaagcatggggtaaaaaggtcaagaaactgaacaactgaataaccaaataagtaggcgaaaccatttggttactcagttgtctgaccaaccgaataatcaaaacaaaaatgtcacattagaaaactacgatcagtgtaattttatgaataattgaactattgagaccatagtgtagcagctgatctatcacgtcatgggattccatcattcattctcatgaattaactactctcagtccttgcttttagcattacctctactccctaatgatacatgatttttactctaacataaacttcccaggagaaaatgtctgataaatatcataaaatcatgaaaatatctgataaagtcatcatcctgcatcatgtgtgggagacttaagtttgtaactcttcccattcctttaagttggttttcagccttgcttacacgatcattgtggccagagagacagaatgtgccaagcgtgtaggcctgagctgggaaacaatgtcaataagtaatacagtataggggatgagaagtttgccaaataatacttggtgtgtaatgttatgaaagaaagggggcattagaggccgggtggctcacgcctgtaatcccagcacttcgggaggctgaggcgggtggatcacgaggtctaagagatcaagaccatcctggccaacatggtgaaaccccgtctctactacaaatacaaaaaaaaattagccgggtgtggtggcaggtgcctgtaatcccagctatttgggaggccgaggcatgacaatcgcttgaacccaggaggcagaggttgcagtgagccgagatcgcaccgttgcgctccagcctgggcaaaaagagtagaactctgtctcaaagaaacaaaaaacaaaaaacgaaaacaaacaaaacaacatggcgtggggggcatcagaaacacacaatggtacagatttaaaagctcctcgggtgatgctaatgtgtagccagggctgaaaacctaaaagaagaatgtgcagtaatgttgccagtactggaaggaagtgtctgagttttgtctagtgactgacagaaggctatgaaactgtaacagttgtaaggggttgagggaaagccgaggccagatcatgtggatcatgtgcaaattgtaggtaaaatgtaaagctgtgagttctgtggcctcactgaggaagcatttctctgcttttcaggaagtaacttggagttgagtgctctatgatttccaagttgtcagctaacacattgaataactgatgaattatggttctgtggccttcatttctgtgtcacgtggctatactgttcattggcatatgcaggcagtaacccccaaactatgacgcgagaggatggcaggattccaggtctgaagagaaaaaatgattaggctggggaagaatgatttgaggaacctcaaatcagactatggcagcaactactaggtgtagggcttcatgccatccagccttggagttgtcagttttctattaatctttgctaacaataaaatactaatgggtacataatgtagtgatttacagatgatagactctccttatgttttcattttgtctcaacagagtccagcatatttcatccaaattttactgatcagagaattgaggtacagacagaccatgaaggtcatgacagttggaaagtgttggagtagaataaggaagcctgatttttctcatttgtcctacatcgctttattagattgtcttctccagccttacctccccgccttataattcttgattttcatgaaacctattaaagggaaagaaaaggaaaactagaaaatttaatttagatcacttttaaaaatcactttgcatcttggactgttgtcataagttataggattaaatcctaatgattctaatgttgttaggccatcttaatttatatgatccacttacctctcagtcttctctcactggctcactcacctgccctctgtatatgaggggattgagaaaagtctgtttttcattatgtgtagatacacagactggtgtgtatgtagcaggaataaatgttcgcaaaactcagatgtggaagaagtaactctgaatttttgccctatttttgaactgtactccaggccagtgctgtccaaaagaaatataagctatatatgtaatttaaactttttgagtagccactttaaaaagtgaaaataaacaggtgacattaatgttttatttagctaaaatatttcaacatgtaatcaaaaaagacttaatgagacattttacgttagtgaaaagaatgtactaaatcattaaggttggaggatattttacatttacagcacatctgaattcagttgccatattttcatgggttaaagtaaacttgttctcccaaaccaatgaagttatggttaatggaagaatattaaaaactgtttgttttcaatataaataaaattgaagcaaaaataaagcaaaatgaaaatttggcttcctcagttatgctagtcccatttcaaatgttcagtagccacatataactagtggctatcttactggacaacataaccccagatcatgataaaacgttctgatttcccgaatttcttttttttagacaatctgggatgtttcgccttcttaccaaagaaacaaaaaggtgctggtactttttgtttgcttgtttttcagcagttgccattgaaatgtgtttcttttggagttggataggaaaaacctagattcttcctccaaggtgtagtctcaactgtgccccaggcatcactgtttatgatggattaagggtgtggcttttcccagataatgagtccccctcccccaccccccacaggccttaatatctacagctcctgtcaatagactggcctttccttccccgcgaaaagtttgagtcctttaagaatctaggtctaaggttaatttcaacgaaaggtttattttctctttctgcgaggacctatggaactacccagaacatataaagcagtccacaaggctcttcaacagcttcgtaaccgggcactgctagttcagaaactcactgacttctgaatgtccatttcacatttgcaggctgcttctctgagtcctgagctcttgtctcaagatgacttggctcttaattgttgtctgatttattaccggtttgctttgcagtttaggtgctggacaatgattcttagaaatccccacataaggatctacatgcagtggcagtgaatctcaataactgccttttcttgaatctgaacttaatttatatataaagcctactttccggtagatcctgcatatttcatctcagccaatttaggactgagatgccccccctttctctggggttttgtcttaaatttctggaggggacctgattgtcacgcccctccgagtgaagagaccaccaaacaggctttgtgtgagcaacaaggctgtttatttcacctgggtgcaggtgggctgagtctgaaaaaggagtcagccaagggtggtgggattatcattagttcttacaggttttgggataggcggtggagttaggagcgatgttttgcgagcagggggtggatctcacaaagtacattctcaagggtggggagaatgacaaagaaccttcttaagggtgggggagattacaaagtacattgatcagttagggtggggcagaaacaaatcacaatggtggaatgtcatcagttaaggctattttcactcttttgtggatcttcagttgcttcaggccatctggatgtataagggcaggtcacaggggatatgatggcttagctcagagtcctgacactgatacagtgccaggatttgaaggcgggtgtggcttacctgatttcatgtacaattcatcccatagggaccttgttccttggcctcaagttgtaggccctttcatatctctgtacggtcaagaaacatggtggttcccttgtcattcttcatcctccaaaaacccattgagcactgtgtttgctggaggcatgtgggaaattattctactgtaccctatatcctgctgaagtgcctgggtactgggtggctagctcatgtccatttgctaagacacatgctcacgattcttgcctgggtctgacataactttggagtcttgttgcattcctgggctggactctggaatgggacccaattacttctgcacctggatacccccaaccttctctgttgtggtggcggttctttcaccatcccctcctctcaggaacacactcttgtttctactttacattctccatccagtccaggaaaatagtatctaggctcagagacggagaaaatagtgtctatatttcacatttttttccaaaaaaaaaaattataattttccgtgcctggacttgagaatttgaaaactccaaaatcctccaggttcaaccacattgttcccaattacaggattttcttattaaagttgaatagtgttccattgtgtgtatattccacatttttgaatccgttcatctgttgatggttacttaggttgattccatatcttgtctaatgtgaatactgccacaataaacacgggtgtgcagatatctacttgatatactgatgtcatttccttaggtatgtacccagtagtgagattgctggattgtatggtagttctatttttatttttttttgaagaacttcctgctgttttccataatggctgtacctatttatgttcccattaagggtccaaggtttccctcttttccatattctcaccaacactagttatcctttgtctttttgagaatagccattctgacaggtgtggggtgatagcatattgttttaatttgcagttacctgactaatgataagcattttgtcatatacctgttgtccatttgtttcccttaagacatgctcgttgagacatggacacggggaggggaacatgacagaccggagcctgtgggggtgggggcgtagggagcaaggggagggagagcattaggacaaatacctaatgcacacaggacttaaaacctagatgacgggttgatagatgcagcaaaccaccatggcacatgtatacctatgtaagaagcctgcacgttctgcacatgtatcccagaacttaaaaaaaataaaaaataaaaattcagttccttaatcacagttgccactgtgattttactttgtcatattttaaaagcttttttatttcaaaaaaaaagtctgttgaggtcctttgcccatatttaattgggttgttgtattgctattgagtttaaggtttcttatatatttttggatattaatcagagtgaagggacaactcatggagcaggagaaaatatttgtataccatatacctgaaaagggattatttccttggctgtgcagaagctgtttaggttgatgcaacttcatttgtctatttttatttttgttgcctatgctcttgggttcatatccaaaaaatccttgcccagaccaatgtcataagcttttagttgatgtttttttttttttttttttttttttttttttgagacagtcttgctttgtcacccaggctggaatgcaatggtgcggtctaggctcacagcaacctccaccttccgggctccagtgattctcctgcctcagcctcctgagtagctgggactacaggcgctcaccacaacgaccggctaatttttgtatttttagtagagacggggtttcgccatgtttgccaggctggtctcaaacccctgacctcatgatctgcccgcctcaacctcccaaagtactgggattacaggcatgagccacctctcatagtccatgttttcttctagtagttttagtttcaggttttacctgtaagtctttaatccattttgagtcgattcttgtatataacagataagggtccaattttctttttatttatttattttttttgagatggattcttgctctgtcatccaggctggagtgcagtgatgggatctcggctcactgcaagctccgcctcccgggttcacaccattctcctgcctcagcctcccaagtagctgggactacaggctcctgtcagcacgcccggctaattttttgtatttttagtagagacggggtttcaccgtgttagccaggatggtctcgatctcctgacctcgtgatctgcccgcctcagcctcccaaagtgctgggattacaggtgtgagccaccatgcccagctgtaagggtccaattattaatattcccaattgaatggaagaagtaaaaggaaacaaaattaaccatattctcacttaaagtcattgttatcattttggcatatttcattgggttcctttttacccgaaatgagggttttctgctatttatttagatgtgatcgtgctatatttatgacttttcacccttttttactatcacataagtgattttaggttattatagacacactttaaatgttcacataatgaccacttattctaaagttaggcatttagttttttatttttgttgttctaaataacccagtagaccattttgtttccttttagacagcttccagcgcatgaaattattaggtcaaaggatattacctttttttttgagacggagtcttgctctgtcgcccaggctggagtgcagtggcgcgatctcggctcactgcaagcttcgcctcctgggttcacgccattctcctgcctcagcctcccgagtagctgggaccacaggcgcctgccaccacgcctggctaactttttgtatttttagtagagacggggtttcaccgtgttcgccaggatggtctcgatctcctgaccttgtaatcttcccacctcggcctcccaaagtgctgggattacaggcttgagccaccgtgcccagccaggatattaacattttttaaagggtctttatatgtatcgcaaaaatacttagcaaaattattattattattattttttaccagtttacactgcccaccaagaagctataaggacacctaaattgtcacataaaactgtgtatggataaatatctctattttataaaccacttggtataaccaaaatcctgcttttgagatattaaattttgaagctaacattcttagcatgtttttaaaataatactgacttcatgagctaatacccataatgataaaatgattttatattccaggaaagctgccatgtgggattgaatgttttatatatgatacacttttatctacatatgttgttatacagtcattggtacctttttattagatgaatttatttcatattcagtttccactgaattgtattcagcttgactacaaattagtcaagcagaataagaatgtgagttttattgtgactaatatatatttggagtctagatttggagagacaaggggtgagtaaaactgtgtgcctactacctgaaaggaaaggttttttttttttttttttttttccccctcaagggaaacaattacggagactgcccaggcatttaatattttattgaaatattctaaaccctcaaatttcgcttctacattttatgtgatgcatcagaaaaacactattttatttgttttataattctccaatagggaaatttcaacacattgtaagtttctttatttaacaacatcatctagcttttaataactgactttcatacacatttttaaaagcaggctaatcgttatagcttaatatatttttcatgagatttagtgataacatgatcacttataccagtagtttatctcctgaatcattttaaaaagtaatgtgcatgttttctttatatttatatacaattgggaagcttaatatttatgaaaatatgattgacttttttttgtcatttctcttcaaagccttaggctttgcagttatcagtagtgcagttccaagatgcaaagtcataaacttacctttcattctctttagtaggcttaatattttgaatctagccataggaagcagcctgaaacctctaatcgaaatcaaagataacaccacaggggtacaatatctctaatttgtcttggaatgatgcggtagcttcccttgactgctgtgattaaattcattctggtttgttcagttaatgagattagcacatcttaacccataggaaatattgtctttatgggcctatgactctgaacagattagcatcatgatcagaaaaataatttttaataaatgattacgtgtgagtggtgctaggctaggatccctacaaatctggcaagagcatattccttgaccttcagcattatatgactttataagacacagcattttctcaggcatgggtataaatacagttaaatatgtactataaaactaaagaacagcctgaaatttaagaactacaagaatttgtgcttgtcattaagctggagataaagttaacatcctgagaagatgtaaaggcgacagtgatacacttctccttgtttggtaggatcatttccacacttgtctgtacttggaattgtaaggtgatgagtcccttaatgatttcttattgcaagtttgaacctagtgtatttcatggtaatagactaaggggaatgagtatatgaaatgagttccagtgtattgatgaaacttagagttgcgtagagtggagcatagcttagtagaaacttgagcaagttactgtagcacatggtcctggttccaattccagcaacatctgttagttttaggacttggtgcaacttgttcaaattttctgtcagactctccattggtttaaaaaataaaattcaaaatattgacaaatattgccttcctgaattttttggtgaatattaagttagatgatgtatataaagtgcctggcccatagtaagggctcaataaaagtagctgttggtaccgcttttaactaattgttgttaaattgattggttaattatatatttccctgccacttaactgtcactcaacagcttttcctcatttcctgcctacctgattggaaatcattatgttgaatatgtctagaattatcactgggcctgctgtattccctgggtggtatgtttgtataggttgaaccactaaagaaaatcttttcggatgagttactttcctatgtcaccctactatttcctagtgggaactttaagttccttcagtctggggtcaagactagtcttagtataggggacattgggaatattgaggatggcatgtttaagtaacattgtatgtattggtcaagaaaaaacaggcaagggatagagtacatcaaaaccagaaaacctatgtacttacctttccatttctgtctttattagatatgttgagtttatttcaagtgcctctatagaacatctacagaacattaatattaagaatatcatgaaaagggatacatttttaagagcctaaattttggataaaatggaagtcattttcttttttttttttttttttttttttttttgaaacagagtcttgctctgtcacccaggctggagtgcagtggcatgatctcggctcactgcaacctctgcctcccgggttcacgccattctcctgcctcagcctcccaagtagctgggactacaggtgcccgccaccatgcccggctaattttttgtatttttagtagagacggggtttcaccgtgttagccagggtggtctcgaactcctgacctcgtgatccacctggctcggcctcccaaagtgcggggattacaggcgtgagccaccgcgcctggccatggaagccattttctaacaacaaatttaatttgtgaaaagctggtagcatgttaactctagaatgacaattttttaaaaggaaaattccaaagttaaagggaaaaaatattggggtagtgccagctagtatcaggatttatactttaaaaatgcataagaaagaagcaattaccagtgtccaaataagaaatgagagtaatagaaaactcagatttcattgtattataaatttaataaataagttacacaattgccgttcagtgcctgaaattgatttttctttttttgaggtcaaacttcaaccatgtatatgaaatgtaagagcaactttctaagcagaattaccctttctgatttccttgggttccttttggttctttaatctgtatgactaagagtgtggattggctgacattatgagatgcaattaatttacatgcttaagttaggactataccatcctgtttccatccattcttgatcacaagcatattacaaatgctgtgctggattatctttactattaagacatactgcagaaagccctgcaggtaaagaaaacaatctagggcttaccttagaggcaggaagaattgcatgttaagaaagctgcatacactctggctttttgctctttgagtttagctcaatgtcttcctaaactttggtgtgcaggaggtgactacgcagtatttaaaatctaatccatattatgtgtatagtatggatggtatagcaattttccaggtggatttttgacaatattttattttttactattcatgttgactttgaaaaataactacagggctagatttgattcaactgtccatggttagaatttttaaaaaagtttttgactctaatacaactgagttccatctacagaaagaatgcacatatggatacggctgtccagaagatcaaatatccttgtactgaagtatatctatatttagtcattattttataaaagtagtagaaaacaatagtggaatataatatgtggtctttggaagaatgagaaatcatccttacccattaaacacagacccaacacttaatgtatttccattttgatagtgacaagttttgggtttgggatgatgtgtcagccagggtcagttaacagacagaaaccacttgagtgactgtagcagaaaataatgtaacaagaggaattgggatctaggtattgaaaaattgacaaagagaagaggtagcaagtgcacaaagtagctaccgctcctagggctgggaagacaaaaggttagaattactaacacttagaacccttgaggaaggactctacaaagctgagctcaggtctgagtagggggctgctacgtggctggtgctaccctctctgggatagcaggaagggcccaatgggactgaggcccggacctctgccagccaggtggtgctggtatttctgcagcaggggcgatgaagctgattctctaagcttttgaaaaacaaaacacaagctaaattgaatagcttgttactaaaaagtgctgctgcaggcatgaagaagcacgtctagggaactgctaataaggacagtaagtgcatgggaagctagtgtgaatgagtaaatcctttgtccctcctccaggcttgcagtctccctctattgctccctacctttagattctgagagtcagtcagtaaagccagaagtacggtttgcagagtctttgcctcagcgttgcaaagtagggtttagaagggtgtgttggtatggctctgaggaagataaaatctctaaccagcatgagtgctaatatgtctaataagatatatggaaaataattattaagtatttgactgaatttcaaggattaaaaagcaatacttaaggcaacaaaaacatcttatatttccattaaagcataatttttcttacagctccttcacattggcaaaattagtttgccctcttgaatttttcaaagatgtgaattatggcaagtaataattgctgcctactattgaatatctggatgttgtagaactgccattgtatcatatttaacttatttttgagagtgttagatttcctctgatagaagatattttttacttttccaagattaatagtagaaatattgaacatcaaatcattttacagataatactgtcctaacattgcgtaagtatacaattattcatagactcagaaatcataattgtcttcacagaaagaaaccagttcagaatactttaagaactatttggaatgttagatttaaaatattctgtagccaaggtaaagcaagttagctaaaattccttttgtttctattgtttttagaactagcttcaaagagaaagaatttgataaatacttagtgtccaataggctctttcatacagttcaaagatgtagactgacactggcatctacagttcctagctgtacttactctggtattttttgccagctgccttcgtggtttctgcttcatacctgtttgtattcataaataactcaatctaagatttttagctttttaaaaagaattgcatacaatcatcatcagattacaggtttgaaagaaatcttagtttttttctttttcttttttttgagatggagttttgctgtcgttgcccaggctggagtgcgatggcgcaatatcggctcaccgcaacctccgccttctgggttcaagcgattctcctgcctcagcctcctgagtagctgggattacaggcatgcgtcaccacacctggctaattttgtatttgtagtagagatgaggtttctccatgttggtcaggctggtctcgaactcccgacctcaggtggtcttcccacctcggccgtctaaagtgctgggattacaggcgtgagccactgcgcctagcccagaaatcttagtctttttaactcagttttgagattctgccatatacctggcactgtagttaagagatggcatataaatgggaaaaataggtatttcaaaagcaatcaaaagcaattacaagactatatagtatgtcctaccacgggggtatgcatgggagcagaaggaagaagagacgaattttgcttggctagggttgtattggggttgaaattgatatcaactatagactagaaacttaaagggattttcatgccaacaagagtacaacaggccattcaagtccatctcttccaaacattgattaaacatcttttataggcagacaatcagttagttgctaagaagactaagctgaaaaaggcttttttttttttggccctgttggagctttcagcctattggctgattaaaaaaaaaaaaaaatgctgaggagtatgaagtcacaaaccaattgagttcaggaaccagtaagtagtttgacatgaccgtaatggaggttttgggatatgggcaattggcaaaaaattgaaaaggatgcgggaaaggtggactggggatacaatgtggatggatgattccttgctcaattgagatgaatgtgttcaaaaaaaccaggaagtttttttttatgttttgcatattagaaagttacatttggtggctatatgcagaatcgtgtatggggagagtacaggtgtggaggtcactcatgaggctaatgtctattcaaatgggagaagaggaaggtctgaaaggcaatcactattggaatacatgcaagtacatctagcattgttctgtctttctgaagatgtggaaatgaagctctctcagaattaaatgacaacatgccatggctgtttgttagagggaatggaagtagagattgaaggtcttgatttccagctgatcatcctttttatggtaccataccactcacccagcctgttgaactggaaaagattatgaacatcaggcattaacctaccaaagtaaagcaaaacaaaaacgctgaacttctccatatttttaaaaatatgtgacacatatatgtttattggaaattaaaatacagtaaaggctctttaactgtcattcaataaatattttttgaatgaacgacgatcacttgtcaataactggtattaaaaaagacaaatattaatggtgatctttattcaataatttcataaaatgggaacaaagtggtaatttgccagtaggatgaggagggcatagcagaggttgtctaaccttttggcaagggcaaagtcaaactggtgaataagcaacacaagctgtgatgagagtcatgtgccatatgtaaatggtgactctttcttcctccaatgctgtttatcaccacaggcttcccagcggcccaagaacagtctgccgcagtcactggcattaataaatgccatctctacctgaatgcccttcttttcaaatttttaccaaaaggaagatagtagactttcagttttccttctggctgtgagaggcatagggagaataacggtaacagatgcaggaataaaaaggcttgatacacatggatattatgtcatgagggattcaggagtttatattaatatacaaatattagttgttttttttttgtttgttttttgttttttgttttttttttgagacgtagtcttggtctgtcgcctaggctagagtgcagtggtgctgtctcaactcaatgcaacctccgcctcccgggttcaagcaactctcctgcctcagcctccccagtagctgggattacaggtacctgccactgtgcccggctaatttttgtgtttttaatagagatggggtttctccatctcggtcaggctggtctcgaactcctgacctcgtgatccacctgcctcagcctcccaaagtgttgggcttacaggcatgagccattgcacctggccccaatattacgatttatcctgccctacctcaccactcttttcatgattagagatggaaaaatttgatattatttaaaaatcagtaagattctatctaatcaaaccattggcagtataattcacaacttttttagagattttctaaagtaatacagatactgtagtattgtagttttgtagtatagctacaagaaaatcatactgtgctctgaaatgctatcttagtaacatattgtgttaatggattataatggtaatcaaaacctccatagagctacaggtttgaactctaacattctgtcgaagttaaagattaatcagtttaacaccatattatttttattatttttgagacgtagtctcactctgtcgcccaggctggggtgcagtggagcaatctcggctcactgcaagctccgcctcccaggttcatgccattctcctgccttagcctcccgagtagctgggactacaggcgcccgccactacacccggctaatttttgtctttttattagagagagatggggtttcaccgtgttagccaggatggtcttgatctcctgacctcgtgatccgccctcctcggcctcccaaagtgctgggattacaggcgtgagccaccgcgcccggcccattcctagtattttcaaatagaaatctgatgcctttattactgtaattagaggaatgcttatgtttcaggttgggttttggtaaagcccatgtggagaggagaatttgcatgaaagtagtttaattaaggaaatgttctcagggatggcaagtaggtgagcaagagaagtagaataggaatggggaagaaatcatgcaaggagcaatcgcaggcaaagtgccagcctcagtctggttctgcaggaaaacctgggcctaaactatgcttcagcttgttgcaacttgatacagaaggagctgggcttttgtattccagtagtcaccagtcattgccttaagactaccctaaggtgacataaacaccaaggcacttccggatctctgtttttgttggcaaagcagctttactagcctgaagacagtcatctaaagagatgtagatacagaagttttgagaagcaaagaccacaaaagccaaggaggtgggcacgcagaagtgttaatggaatcttagtggatctggataaaacacgattttttggctataacctctaaagggctaactttcagaagattacgtggacccaattaagcacttacctgaataattttgaaacatctctaattgtactatagctagagttaaaagaaaaaatattttctaatataaacaaaaagttcagaattatagcattattaaagaagcttttttcaaatgttagcattcctgcttcttgactttacatttttccggaacaaaatagttttccaaagagtatacttaatgacttgtgcagatgaattctaaatgataaccacagggctcttggacaagggatcatttaaattttgagttcttgtcagtcagacatatcaatccatatacatttccccaaccagggtgtcagaagtgtagtcaagtgagttttgtaatgatacttctttgtttacatctagctgcagaaacctcttaagactgattctgcatcagaataattgctagagggaaaagggaagctgtgattatgaaataacactgttatccactggcacccctttgtgtctatcttagttgaagctttgaggcacttctgtgtctattatttgattttaattggcaatggtattgattataaatcatttgacagaatataatttttatcttaaagtttaaatgtacctagaggctacaaagattcctgcgttcaatgaaaacattaaagtaatagtgtaagtagtttaaatgtgccccatttggcacagattagtgtcacctatggtacaactcagtcaaaaagtgaatgtagctgaaaactgaaactgttcaacagctccaaatttaagaaacacggaacattcactatgtgcaatagacaatgctagttttagtaggggattaaaaaaaaatatctttcagccaggggctcataaagtagtgaggaaacctacaacaacttcaagtcagataatgacaatatgtcattaagggacatgaacaaatgaccgagagaccgcaagatcaggagggactttttttggagttggttataaaggaatggcaaggcacatgggaatcaagaattcattcaaacagagccttgaagaaaggtgttggtggagtggaaggctagaacacaaaaatacaatctacagaataagaaagcactagggggcaactgtggttggagtacttacaagaacggtttaggaaaataactagttgtactacatagactaaattggataactgtcaagatttgaggattataggtgaagaaaccattttagagtttattataactgacattttgtatctagagacaacagggatatcagtattgatgtaattaaaggatgtggcaagaatgaggtgaaaataacttatgtcttagggctgaaaaattgagaggatggtggtatcattggatatggttagaaatagaaataagcaaaactatgatggggaagtgatttgtatttgggatatattgtctttgatgtattgatgggatatccaataatctccggaaaatatgtctggatctgaggagggaaatcagtgtgtgtttgataggtgtagcagtgagaaagtatcataggcaagataccacaactaaagaaaatggtttgggggtaatcaatatggagtttaagccatgggggcagatgatacggcaaaaggatattatacacagttaaaaaggaacccaaaaccaagtcttggagaattcacatttaaatacgtgcagatatagagaagccagcaaagaagtgttaggagaagtcacaggaaactgtaaagtgtctggtcacagaagcagcaagaaaaacagtttttaaggaggtgactacattgaccaaaggcagtgattgaattgaaatttacttggggtctgagaaaagaccattcggttttctggttgctttgactaattttaaagtaacaatttcagtggagtagtagaccataacctataaatgcattgatgtatttatttattcattcactcactaattcacttatccaatagtcattcatttattcttcggtgcttacaaccgggcctggcactggattaaagtgaaattagaagtagataaactggtagagatagccaaaacatatctccctacagaagggaaaagagcagaaaattatcatggaaacactttgcatagagtttctcacagcaggttgaaagtatcctaaggttatagcagtgtaggctggaggaaaaggagaaaatacagactaggcaggacaggcactggggaaattcaggtgtaactaagaagagactgagtgctgggagacagggtgtaatctgttaaatagaaacataggcaatagtaaatcagggaaccagaaagagttcaagagtcgatgaagagggacatgtatcaaggtctcgatcgagagggctgtgattcaaggcagagcctccattccagagggagcttaggatactcttctggttttctattactatgtaacaaaacaccccaagtacagtggcttaaaataacatctcttttatctttttatctgattttgtgaatcaggaattcagccgtgttcagcttattgatttttctactctgtgtggtgtcagttgacatcacttggcagaattcagctagtggatgtgctggtctggagggttcaagacagattcacttaatgcttaatgccattgtgagaatggctgaaaggctcagttcagcagggactgtcaaccagaggacttgtagatgtcttctacagcatggtggtttcagggtagtcagtttttatgcatggcatcttagggctcccagagtgagtattctaagaaacccataaagaggctaaaagttactaataatgatctaatcttggaagacctataacatcatattcgttgcattctacttggcagacaagttgctaagacaaatccgagctttaaggggagaattagatgctgcctcttgatgaaagaagtgtcaaataattttgtggccatttctagtccatcataactgctgtaaatttcctcctcctaccatggtattgagtgatgcatatctcacaggaggagagtgtgtcagtgactctagctgagaagggcagaagaaagaagatccttgcacaaacaagccaggcgagagagaaaactggcagtttttaggaaagaaaagagatgcatcttggcaggaaacaattgatggtagccagagttcaaggctcatgctgaccgttcattcttctacattttctaagctcaatctttgtatcaatagagaatatcagaaaacttccttggggaatcttactttggctctctgtaaaaatgaacttgtcgcaatgttctaccctcaacaatgggtgaacacagatttaagaaaaagacatgaaaagcttatctgttcttttgtgaaagtgccaaacactttctgttaaggttttcattgttgttaaagtgaaaatttggtatgacagctgctgtgagggatagacttaaggccttgcaactcaaattatggtctgcaatctaggagcaccagttgaggttttgttagaaatgtacattttcaggcgctatcctagacctcacacgagtctgcacttgactaacatcttcagaggtttcatgtgcaaacaaatgttgagaaactctgatctaagggatgtttcattattcagatcattgcaaaggacttgttaggttcctgttcttggtcttgtccctgtggacttcagattgaaaatcttacccttagcttaggctaagataaaattcctttccttttatttgatggcaattatacataacatgtcattacttgatttttattcgactttggagaagcaaagggttttggctaatttttagtaactattcttagcttttacaatgttatcattttatgtttgcattttttcctagccttatttagattctagacacagaataggggactgtgagtgctgagagtatccttagagaataaccactgtaacctacttcattttcatataagaaatgaatgctcagaaatgtgccttgatgtactcatggctacttaatcagtggtaaagctgagcctagaattatttcctcaaaattgtagtcctctgtacacttggatcagaattaacaggcaatgcatgtcataacgggctcatccaggtggttctaatatatactaaagtctgagaaacaggcctgagtgtagcttcaatgtctgctctctcactctaatgcctactgcctgccatatctagatgcctgtgtgtatgtgaacgaggagggaagagaattaaatcctagagatgttggtagccaattatctcaaaagcacatatttaggggtcagcttttaaaaggaggaggggggcttattcccctgacatttgagcaaagcaggaaagggtcggtgatgaaatgccatgtgtcctgaggacctacaggcctgggttatatgaccacttcaggaattgcatagcaatcaaaaagggaactaaaagaatcggaggctgggtaaaatcaggactaacaattgataaagcaattatgatcaacagtgagtgagagaaggagatttacctgatggtgaggtggtagccaccactaagattagtttaaataagattagccaccactaagagttttaaaatgaatgcatgaggcactggagtcttccattgcttctcttgccctccttgatgtcttctgacaggagccatagagatctttataaaacacaaactagatcatatctctcctacccaaagcctgtaaaagcatctctattacatttagtttaacatctctactgtggcttaccccttatccttctttgcccactaacttcatttagcatccacttcccctacttccctttgtgcatcttgtgcctgctatctgtaattcttccctttttataaaatctcctttttaagatcataccttgaattgtatctcttcagaaagggcttcctatagcttagccttaaaattctttttcagttgactttatttctaccttagcatgtaaaatgttgtcatctcttatttgttgttcatcttcttgagacagtaagctccagaaatgcagaaactaaatcattattcaatctaacctcatgtgatatctgtcacattgtagataatacttgaattttaaaaaggggacagaagtttcaagaacagtatactgtggtttaagtgagcaattcactgtgtgtgatccatggggtaggatggttcgaggtaggtgagaaagcatgaactggccatgaacatggacgcaaattgatcaaagtcattgcagcttagcaggtcaaaaagctgtgaggtcagagcatcagttaaaatgttcaatggtagttggtcatgatggcattagcaacctttaaatttaaagggacttaagtcacatccagaaatcggggatgacaagcctatagtcatcctctcttgaagtcttctgctgatacaagtaatcattcagtctgttggtctctatccccatgtcaccaccaacgatgactgggatccagtcaagcccttggatatcatgtcctctctcgtgtccttttcataccaatttaatcatgcctggagtgcccagaagcatactttcagtctcgcctgctttgacacctgactcattcatgccttaacctactgtgctagtgttatgatggggagggagggggtgactgagtggatttgacctcccaaaccatattctagcaagcaaggtacatcttaactctggaattcttctaaacctatatagggtttctgaaacttagtctcagagtgggagtggaatgatacagtactttgtcagaagctcataacaacgactgtgtcttaccataatccattacaatactgttcttgttccagttgaacagctggaagttgaaaaacatttcctttggaatgagtcaaactgtatcttacacaatcttcccagctcttatttacgagatagataatgtcattggtgctcaatatactaaggatttttcaatgcagggctctaatcttatcaatagattccagggaattactgagaaacacattatttgatccttgatgtctctttccttgtatttttatagtagcacgcttgaggaagtacacatatatagcttccaagaatgagggaaggcatcagttaatatgttaaaatagaaacctcccacttgatcttaagtatggggagggcgggggaaggagacaagccttaagcctgtttaccattgcaggtaaacaaacatgaagatcaaattctaagtaaggagagtttgttatggaatagctgagactgagggcataaagacaaccattcaaattattctagggtttcagaagacactgaagaaagaatagggagatgaactgttggtgaagcagagaggaaaaatagaccaagattaagagaaaaaaaacacgggaaaagattgcaggttggaggagggtgggtctatccaaggctgaggtcgaagcttacggcaaggatgcaggggaagaatgttttgttaatggtaaatagattgcaaaaattctgtagtttgcctgttcattctgatgatgggttttgtggttttttttttttttttttttttttttttttgctgtacagaagccttttagttctatctcagttgttaatttttagttttgttgcaattgactgatgtttttgtcaggaaatcaaaatctttgcctgtgcatatatcctgaatggtattgcttagattttcttacagggtttttatagttagtgggttttgtgtttaagtctttaatccatcttgagttaatttttgtataaggtgtaaggaaggtgtccagtttcagttttctgaatatggctagccagtcttcccagcaccatttattaaatagggaatcctttccccattgcttgtttttgtcaggtttgtcaaacatcagttggttgggtattagatgtgtgatcttatttccaagatgttggttctgttccattggtctatgtgtctgtttttctaccagtaccatgatgttttgggtagtatagtctgaagtcaggtagcattaggcttctagctttgttatttttgcttaggattgtcttggctatatgggctcctttttggttctgtatgaattttaaaacagttttctttttttctaattctgtgaataatgtcaatggtagataaatgggaatagcattgaatctataaattatacagtatggccattttcacagtattgattctatccatgagcatggaatgttcttccatttgtttgtgtcctcttagttccttgagcagtggtttgtagctctccttgaagaggtggtgcacttagcctgttagctgtattcctacttactttattctctttgtagccattgtaaatgggagttcatacatgatttggctctctgtctattgttgtaggaatgcttgtgatttttacacattgatttttgtatcctgagactttgctgaatttgcttgccagcttaaggagattttggggtgagacgatggagttttctagatacacagaagagacagtttgacttcctctcttcctatttatccttgatttctttctcttgcctgattgccctggccagaaattccaatacagtgttgaataggaatggtaagagagggcatccttgtcttgtgctggttttcaagggtttgtcataccaaaacctacagccagtttttgcccatctagtatgatattggctgtaggtttgtcataaatagctcttatttagagacatgttccatcaatacctaatctactgaaggtttttaacatgaaaggatgttgaattttatcaagacttttctgcgtctattcattcctttgcattcttttttctctaatcttgtctgctggtgttatttcagcaagataatcttcaagctctgaaattcattcttctgcttggtctatttggttattgatacttgcggtagcattgtgaagttcttgtgttttttcagctcccttgggtcatttatgttactctctagactgataattcttgttaacagctcctgtaatgttttatcatggctcttaacttctttgcattgggttagaccatgctcctttagctcagtaaagttcgttattactcatcttctgaagcctacttctgtcaattcagccgtctcagcctctgtccacttctgtgcccttgctggagaggagttgcaatcacttgcaggagaagaggcactctggctttttgagttttcagtgtttttgttttttgattctcatcttcatgagtttgtctagtttcaatcttggaggctgctgacctttggatggggttttaattgggattttttttgttgatgctgttgttgttgctttctgtttgcttttttaacaggtccctcttctatagggctgctgcagtttgttgggggttcgctccagaccccattcacctgggtcccttctgcacttggaaatgtcacctaaggaggctgcagaacagcaaagatggctgcctgctccttcctctagtatctctgtccctgagggtcactgaccagatgccagcaggaaccttcctgtataaggtgtctagcgactgctgttgggggtgggtctcacccagtcagggtgcacgggatccaggacccacttaaggaagcactctggctgccccttggtcgagggggtttgctgtcctgggggaatcccacttgtctgggcttcccggattctttagagccagcagggtaaagactaagtccgctgatctgcggagaccatggccacccctccccctaggggctcaggtccaggggaatcggagttctttccctaaacccctggctggagttactggaattcctgcaagcaggccctgcccagtgaggagggatgggtcagagtccggcctaatgaggcaatctggccattatttgccatagctggtgtgctgtactgcagggaattcctcctgggttcaaactgtccagtctccctcaaacctgaaggggaaaaatggtggactggagctgcagtgatggctgctgccctccctacaggagctcagtcctctcagtaagccggtagccaccgtgatggctgctgcccctccccacagcagctcagttctcttaggtggcagttctcttagatgccgcccctccccgggagagctcagtcatttgctgtaacaggcagctgcagtgatgatggccgcccccgcccccggaaactgagcagtcttaaggagtcgtctccatccgagtggcctgcgagaatctgcacagctgtgttttgagacccaaggccctgttggcatgggctcgcaagtgggatctcctgatctgcgggttgcacagatctgtggaaaaagaaagatttcccaggcagggtaggacaatcactcactacctcccttggctgggagtgggagcttcccttgtcgcgtttggctcccaggtgggccatggcaccaccctgcttttccttgcgctctcatgccaactgcctagtcagtcccagtgagagaacctggacacctctgttgctggtgcaggattcactcacggttttggttcttctcagtgggagcctctgactgcagctgttcctagttggtcatcttggcctctctccatatttttccatttttgatgtaactttaagtttttgcttaaattcccatattggatattacagtctaaaatcaagagaaggttaatgtggaccgagccattatttaaatttaaggttcaaagaggtaggtcattcagccaggtgagtgagcaccaatcttttaaaaagttggttaactatttgatagtttccacttttcaagctgataatgatattttaaaccaaggtcatttcaatttccttttggttcaatatttttggaaagttgctacctctttgaaataaaaatattttgtacaggattgtttacaattagcaaatgtttgctgataaagatgaatcactgaattaggtaccttttgtagttatgtaataaagctcttggtaaaaacttctatttaagcagttataactaatttttcctattgaaatgtcaggtacctattaagattttctcatagggcaattttaaattttttctttgagctttgtaagaaaaaaattgtcaactctactttcctttggctcttattcaactttattttaaaatgcatttttctagaaacactaactaaaggtgacagttttagttcacagggaactatttttgatttactatttttgttttggaaatgtctgaataaaccactggaaattatagcttataatgaagaaaacaagataaacacactttttatctaaagtgacagtaaaaatctagcaaatgggagaaaaataaagtcaacttttttttttttttaacttctccaattgaacgtcaaatgaacatattgggcaaggaatacaaccttagttgcatttacaatacagtggctacaacagaagagttaaacactaagtcttacgaaaggtagctttagaaatatttgaaagttggccgggtacggtggttcaggcctataatcccagcactttgggaggccgaggtgggcggatcacgaggtcaggagtttgagactggcctggccaatgtggtgaaaccctgtttctactaaaaaaatacaaaaatcagctgggcgtggtggcatgcgcctgtaatcccagctacttggaaggctgaggcaggagaatcgcttgacactgggagacggaggttgcagtgagctgagaccacaccactgcgctgcaggctgggcgaaagagtgaaactctgtccccccccccccacccccccacccccccccaaaaaaaagtgtgtgtatgtatatattaaggttgacactgtatttaaaaaatttctatgaaactgacaaaactattgcttcgttaattcttttttgcaagattgcattggaggaactgcatggaatataatgactgtgttcttttctaatagcacatgagtcagatctctagaaactgacttttgcccatattcaatttcagcagtaaaataatttctagcttgatatttctcataaaaactcctagggctcttttaaaaatattttataaatatctttataatgtggcttaatttttcagacatcttctgtgtagaaacaaatattcatatgtatgtacacatattagctattgctgtgtaataagccaccttgaaactcagtaggttaaaacaaccaacatactatttcaaatacatatgttagccaggaagttcttcaccttactgctaggattactcgtgtgtctctagttagctgggggttggctaaggggctttgctgatctcagctcagctctgcgaaatgtctggctgtctgctagtctgggaaaacttcatctgggacaactagggcaacttgactcggttccacttgtctcatcctcctgctgtctagctctgatgtgctcttacggtaaatgcagaggcatgaacaagagagcaaaagtgttcaagcccttttgaggtctacatttgggagaggaaatgccagcacttcaattgcactctgttggtcaaaatgagtcaaatgccaacccagatttaagaagcagggaaatagataccaacttttcatgagaagaacagcaatgctacattgcaaagggtatggattcaggaaaggatgaaatactaggcccaattttgtagttaacttaccatttacagcagttgctcctggacagtatggcttccttgccaaatatttttgcatgcaaataattggtaaacagtgccaatattggtttttcctaaacaatactatgttaaagtgtcagtcaaaatatgaattaaaaaatgcaaaacatggtaagagcttctcaaaattagttatgtttgaaagggtgaaaagaaaagacaagcagacatttgcctaagcagctttgggtggttaatcaagtcggtacactcggatggggtgtcttgtacctctctagtctcatgttccatccgtccacttacgttccaagaagtggcttatagttccttgaacagtgcgtctatttcatctgatccttagcatgtgaagtttcctctgcttgactttatcttccctttacacttctacctgttgataacctgttcaaccttgtatattctattcagggattttcactctgttgttctctccagtgaagatatcttttatttgtgccagcaccatacttacgacaaaaaaatcactattaataggattataacaccatgctataattatattcgcttaaatgtatatttccttcctaggctattacaaaagctgtgaaaacagtggcagtatgtttttatcttttatcttcccatttttcttaggacagtatgatgcataatactggttacatttagttgaatgactatccccctcgtctgacacataaggaaaataagccaagtgctatgtaatttatcagtgttcacacaactggcaaaatttaaattatagaactgtaataaataaaggcctatttgcttccagatactatattatttaacttacaactacaccgaatctcacatggaagactttcaagtaaggaactggcacttttcagtggatcttaagaaatggctacactaaatgccctagttaaactttttcttctgtttactactacctcatttaatccttatcaacttcaaggattatatttcttatattttgatttatatagccttaagtttttgttgaatgatatttcttctttagttaatataaaaagccacatttttcaaatacattagagtgaattatacattcgaacaatttgcagtgtgctctaaaatagtatttagtaattgagtctgctgagcacactggagtcctgaggagttaatgaaacccccgatgtcaaatgatataacaataggaatttgggactttgaagaattttcctaatgtatatatgtagaattatcactgttactatctttccattacaaatgggacctacaattaggagcaattttattggcaggctatataactgtatctgaccttttggaaatgatagaagaaagaaaagatatattaaactatctttgtagaaaagatgacgtaaaggctcaagtaaaactcacctaacccttgcccctgaatgtgatgatagtcaagcccagcttaaacagcagttgcaaagtaaagaatggtgtagagatctgtagatacactgcctaagtccaaattagtatctagcacttacttgctgtgtgaccttattcaagttacttatattgtgtctgtttcatcagttgtaaaatgggggtgactgtgaacattaaaacaacccacaaaaagtacacagaagtagcgctgacataaaccagtcgatgtgtgtaactcgcatctttctgatacatgaggtagagtcatataaaaattgtaatatttgacaatatttgacttcagaattggaaattgcataaagttggaccactaaaaggaaataaagcatagcagtgacagacgttctcctttaaatattttatcctctgtgacttttgacagaagatcttctttaaatattgtatcctatgtgacatttatcttttctgtgtttccaatttctttgatttggaacttcctgtagacagacccttacaggcatggaagaagaaagaatgaataaaccaaggatgacttcccagtaggtggaggatgggaataattaggaagaagctgtgtcttgtcacctatattgtccatacacaactgcaccgtagggtaattgagaaattataagaatggtaataaatacgttttacattcattaattaaagtcatctttggatgccctttgtccataatgtttcctctactagatctgaagcctaaatatcacttttcttctctgcaatttccctggaactgagtactcatagatgtttgtctagtgagccattccattatgtcatggtatatgtgtgtatttgtgtgtgtgtgtgtgtgtgtgtgtgtgtgtgtgtgtataaacacaatcttttttttttttttttgagacggagtctcactctgccacccaggctggagtgcagtggtgcaatcttggctcactgcaacctctgcctcccagattctctcccaccttagcctcccaagtagctgggacttcaggcgcgtgccaccatgcccagctaacttttgtatttttagtaaaggtggagtttcgccacgttggccaggctggtctcaaactcctggcttcaagtgatctgcccttctcggcctcccaaagtactggggttacaggcatgagccactgcgcctagcctatagatttcttttttgaagaatcagtgttatttgcatgctttgaaacaaagtgcttcatcttgccaaccttgtaccataccgtttctgtcagaaaagcaaccattgggatagattgtaattagccttcatttccatcactggctatctcaaatgcaaatcatgtatctatgtgaatcaaaagaaaaactggatttaggcctggtgcagtggctcatgcctgtaaatctcagcactttgggaggctgaggcaggtggatcacgaggtcaggaggtcgagaccagcctggctaacaaggtgaaaccccgtctctactaaaaatataaaaaaattagccaagcgtagtggctcgcgcctgtaatcccagctactagggacgcggaggcaggagaatcgcttgaacctgggaggcggaggttgcagtgagccaagatcacgccactacactccagccaaggtgacagagtctcaacaacaacaaaaaactgggtttaactttcagaatgttcaattttataggggatatttaaaggtggtgtaattagtataatcatggattgtaatcattccacaaattttaaaataactttgtgaattacattaatacataaaaatataagataaagcatttaccataattttattaatatttcctttagaatacctggtaaaatgaatgagtactgacctaacttaaagataaaacaattgagacctagctttagaagttagttttattacaaaacatgttaaggatagacctgatcagacaatgaatcatgctgactttttgttaagcatacttctgggttcataacatcccacttacatataacaacttgatttccattaacgatggtgtggtttcctatttaaagttcgaatgcacatctgtttgaatcatttctagtgtacttaatagagtaacatacatattgggttctagttaagatgctttataaaatgccaaataacattttatatctggagagattataaaaacttgtattttgtagctttgctcttgaacacttgctagctgcaaggaataacttggctttttcttgatgatcttcatagccagattttcgtgctttttttggtagagagaagtctctacaagtatttgacgctaaggaataatgaataaatacctactgattttatctgctaaggtccacaaaacattccagtattttgatatcactattaaagaagacgacggtgttccagtgatacatatgattccttacaatgacatcaccagagatagaaatatgaggcatgggaagtaacacgtaggccttcatttattttctgatatggacatccctggcattgatctccttggctcaaaggaaatttgcttccatgtctagggtggtgaatgtctttggcttatttctttggccctactctccacttttgtcttccttgggaggctgatgtctgtggactacatcaacaggctcctttgccctctggctactagttggatttggccaatgagagccttggtaagagagggagagaggaaagaaattccatcacccaatatcaaagctcctgtcagataatcttctcttctcagttctctctctatgtagtaactagaaaccactctccttcttttcattcttaggagtctaagagtagtagtgacacttctctattactagttccagtggtttcattataccttccctcatttttataaacagtcccttattaaactcttctcagattaccaaagtcctgctatggccatataaatttcaaaggagagtgtcattctccacctccaggtgataacatttaacaggagggaatgtaatttatttaatgtttttattgagcattttctatgctaggtaccataccagacatcttacatttattaacccttttaattctcatattttgaagttggtcccttctgttactttgaggccaacattacaaggaaagttatagacgatatggattatttggcttagaaagtttggaataaacgtgtgatagctaacacttacagaatatatcttacaaagtgccatactaagttcacttaaatctttgcaatatcaccacaacataggtaatgatacatgctctttctatagatgaaaagagtaaggcacggagaagttacttgcccaagatcacactgcagagctgggagttgaacccaaggcattctgggtgtacagtcaacattcttattcatggcatcataccattcccccgtgttttccaaagcatattttatcagtgtgacttttttctaaattccctctgcataaatctaatgtatttcagtcactagtattctaactcaaaatacaaaaccagcatttttctatctttaggtgactcctttcaagagaaaactaacctatgatgccacaagtcgtcatagtggccattcttgaggggagcttccacatagggggtgtgaggaagctgctagggtgttgatcatattctgtttcttaaatctcgatgctggtaatataaatatgttcggtttgtgacaattcattgagctgtacacttaagacgtgtactttcctctatgtatattattccgcaacagaatactgctttattatacaataccttttccaactcatatttaagaaaacaaaaaaaaaatcaactcggaaagcttcctatttacatgaaaatgggttgccttatttttctgggagctggtcagcagcgttcttcagtaagttttgaatccccagttttgcaattctttgtggtatttgcgatatttttggtgtttccaatgtctagggatttgtaattgcagaagtatcttgactttcttagcgacagttatgtccatggcttgtcctttttgtaatcagaaggtcatgctaaattatccctgtgttctttactttctactgaaacgtattgatccctttggattttcaggttaaaagaccaatacaactctgaagaatcagaaaccacttaaacaccttcacaaatgcatttcctttctcaaatttttttactttgatttgttccactttgatttggttcactttatttatgccacttgtcaacctacctatctgtgtttctttttgaacactgtttgtgcttccgtatttctttatttcatactaaaaaggatttggaaggaatactgtctcgtttttaggtcctttcgtgttgtggtttgggttaacaaagacaatatatatgcagatacattaaactgagtaatatcagatatccactcagttcacttgataagggaaatcttagtcataaaatgaactgaagacagagagctacagggtcgcctggcccaaggaggaattcatgttttgtgtgcttcacaaaatagttctcatacacttgaaaaggaagccattaaaggttgaattttaaagaaaaaatattgttcttaggatataaaatgccacctgcaacaaagacatggtgtatgttgaagatgaaaggggagaacaacaaaagaatacttaaaaatagtcaaaagaacaagaaaagggaggaaaaagcaagtttctaagtgcatcctctgtaccatctgcattcaccagttttagtaattgtatagggaataatgccttcccctattgacttgcactcccacagggatgccaaactaatagaaaacattttacatgtattctgcactttctaatataatatttttatattatcgaaaagactttaacttgtgtgtgtgtgtgtgtgtgtgtgtgtgtgtgtgtgtgtgtgtgtgtgtgagatcttgcttcgtcacaaaggccggagtgcagtggcacgatctcggctcactgcaacctccaccttcctagttctagcgattctcctgcctcagcctctcgagtagttgggatcacaggtgtgtgccaccacgcccagctaattcttgtatttttagtagagacatggtttgaccatgttggccaggctggtctcgaactcctgaccttaagtgagccacctgcctcagcgtcccaaagtgctaggattacaggtgtgagccactgcacctggccgagttaaacgtttttacacctagaatttggtcaaagaaagagatgcagacaaatagtgttaaaatgaaacataaaaatcaatctatatttattgagtgcatacgatttgccaaatctgtataacgttcctatgtgttgcagttgaacctcacgggagtgctctggagtaataatttgagccccattctaatagtgaataaattgtgcctcagaaaggctgtcacttgcccaagataacacagctagtgagtgagtgagagacctgagttcagaagttagctatttctgcttctgaaacttgggttacttttgctatagtatctataattctatagagtaagttgcaggcaggaaaattagaaccatccaagagaaatagtatgttagattttacctggggtattcatactacagggagaataaaactgagcaccgaaaggtctataaagttacaggctaaatgtagcacatttcactaaaaaaaaaaccacatcagaccgtgggaacgggggtgggggagatttttactcaaaagtacttaaaattacttttacataagtccaggtgtgatggctcatgcctgtaatcccagtactttgggaagctgagggaggcggatcacaaggtcaagagatggagacaagcctgaccaacatagtgaaaccccgtctctactaaaaatacaaaactgagctggacgtgatgacacatgcctgtagtcccagctacttgggaggctgaggcaggagaatcacttgaacctgggaggcggaggttgcagtgagccaagattgcgccactgcactccagcctggcaacagagcgagactctgtctcaaaaaataaatgataaataaatagttttacgttgaaacaagcatatattaaaagaagaaggcaaaatctctaggaatttttagcataaagtatatgctttcaaagaaatttaaaacctgcaggcactgtgtaatttatactgccagactccagggtaaattccttcaatttcatttcctggaaggatgctctggtagaatattctgagaagcactctattagagaatatggtgaatatgactaatagaaattggatttcaattgtgatactttaatatatcattgactctgtgagtttcgaaaataatacgatagcaggaactgtttctctatcacctcactgctttctctctctcggtgccccagctaggtgtacatggaatcccctacctgacctataatcctttactccctctccattttggttacctccagttttaaaagaagacttataaaagaccttggtctatgtatttaagtttggcccacaaagcaagattctgtctgcgtttttgacctttgcctagactttgtctccaaacccaaacgtagtccttgtgtcttggatgctatatgatcctgatggctttgggattcatgttttattctgtactccaagacttctctcacctttcccagtctctgctcctctttttgaataaacagcagtttatcacgcacatacttcttggtctgacagacttcaactttctaccctggattttttcttttcataaaaacaagtatctctgtcagttaacagttaactatattttcttcaacaatggacacattgcagtgcataagattattttttgatgagtttaaaagtcatgctttgctcagataagtgtgaaattttgctcctggccaaaggagggaaaaaaacacatcattttaatggcattgtataccttcattcaatttgaaaaacaaattattacactcaaaataccaaattattccaggttagatatgaagttcttggcagcactattagaaagtgtaaatttattttcttattactagagagctttccttaaagtttcattaaaatggcactgttttaagatttatgtgtatattatgtatagtaaagttgctttgttttagattaaatttatggatacatagtatatttagggggtaaatagatatattgatacaggcatgcgaagcataatcatatcagggtaagtgaagtatctgtcacctcaagaatgtatcctttctttgtgccacaaacattccacttcaaatttttttttttttttgagacgcagtcttgctctgtcacccagggtggagtgcagtgatgctatctgggctcattgcaagctccgcctcccgggttcacgccgttctcctgcctcagcctcccaagtagctgggactgcaggtgcccgccaccaagcccacctaattttttgtatttttagtagagacggggtttcactgtgttagccaggatggtctcgatctcctgacctcatgatccgcctgcctcggcctcccaaagtgttgggattacaggcgtgagccaccgtgcctggcccaaattcttaaatgtacagtaaattgttgactgtaatcaccctcttgtgttgccaaatagatcttactcattctaactagatttttgtacccactaaacattcccactcctcctgtccccaactacccatactacactctggtaaacatcattctactctctgtctccatgagttcaattgctttaatttttagttactgcatatgagtgagcccatgcaaagtttgtttttgtgcctggcttatttcacttaatacaatgtattccagttccatccacgttgttgcaaatgacagcgtctcatttttttttatgactgagtagtactccactacgtatatatgtaccacattttctttatccattcatttgttaatggatacttggattgcttccaaatcttggctattgtgaatagggttgcaataaacatgagggtgcagatatttctttgacaaactgatttcctttcttttgggtatatacccggcagtaggattgctggattatatggtagttctgttttcagtttttttgaagaacctcaaacagttcttcacagtggttctactactttacatccccaacaacgatgtaccaaggttcccttttccacacagccgcatcagcattgatgttgcctgtctgttggatataagccattttaactggggtgagatgatacctcattgtagttttgatttacatttctctgatcaatgatagtgacaaccttttcatattcctctttgacatttgtgtcatctcttgagaaatctctattcaaatttttgcccttctttcaatcagatgattatatatatttttttctatggagttgtttgagccccttatagattttggttattccttgtcaggtgggtagttggccagtattctctcctactctgtgtgttgtgtcttcactttgttgattgtattccttgctgtgtagaagctttttaacttgatgtctcatttgtgcatgtttgctttgattgcttgtgcttggtagggtattgctcaagaaatatttgcctagaccagtgtcttggagattttatcccaatgatttcttgtagtagtttcatagtttgaggccttagatttaagtctttgttccacttagattgatacttttgtatatggcgagagataagggtctaatttcattcttttgcatatccatatccagttttctcagcaccatttattgaaaagatggtcttttcttcagtgtatgttcttggcacctttgttaaaaatgagtttactttaggtctgtggagttgtgtctgggctctattctgttccattggtctatgtgtctgtttttatgccattagcatgcatttttggttagtatagctctgtagtataatttgaagtcaggtaatgggattcctagttttgtaaacaaggatcatttgattcttccttttcaatctggatgccctttgtttctttctttgatctagctaggacttgtagtaatatgttaaacaacagtagtgaaagtgggcatccttgttacagatcttagagaaaagtcttgtagtttttccccattcagtatgaaattagctgtgggtttctcatatgtggcttttactgtgttaaggtatgctgcttctatacccagttttgagagtttttatcatgaaggcatgttgaatttttatcaaatgctttttcagcatctattgaaatgatatggtttttgtccttcattctgttcatacgatctatcacattgattttttgcatatggtgacccatcttggcatccctaggacaaataccacttggttataacgaatgacctttttaatgttgtgttgaatttggtttgctagtattttgttgaggatttttgtatcagtatttgtcagagataatagcctgcagttttgttttctggatatctgtctggttttcgtgtcaggctaatattggcctcacagaatgagttcagaagtacttcctcctcctctttttcacaatagtttgagtattaggtgtttcaatgtttggtaacattcagcagtgaagccatcaggtctcgggcttttcttcactgggagactttttacatctttgatctcattacttgttgttggtctgttcgggttttgcatgtcttcatgacacaatctaattttgagtttggtttgctattctagttctttaagatgtattgtttctcttttttttttttttttgatacaagtgcttattgctgtaaactttgctagtactgatttatctgtagcccacaagttttagtatgctgtgtttacagttttgtttcaagaaattttataacttccttatgaatttcttcattgacccactgatcattcaagagaatatagattaattcccttgtgttttgtataattttcaaaattcctcattactgatttctcagttcattcaactgtggtcagataagatactttatatttcaattttttgaatttaaggcttgttttgtggcctaacatatggcccatccttgagaatcctccatgtggtgatgagaggaatgtacactctgcagctgttggttgaaatgttctgtaaatatttattaggtacatttagtctgtagtacagattaagttcaatgtttcctagttgactttttgcctgatgacgtccaaggctgaaagtggggtattgaggtttccagctctctttaggtctaataatgttgctttatatatctgggtgctccggtgttcggtacgtatatatttacaattggtatatcttattgctgaaatgattcctttattatatgttgatctttgtctcttcttacagtttgtcttgaaatatattttgtttgatgtaagaatagctactcctgttcttttttggttgctatcgacatggaatatctttttacatcccttaattttaagtctggctttgtaggtgaagcgtgtttcttgtaggcaacagattgagtcttggtgtttgttgttgttgttgttgtttgtttttttttttttttttctgtcactgtgttttgattggagagtttatttcatttatgttcagttttattattaagaacttattcctaccattttgttttctggttgttttgtggctttctcttccatcctgtcttcctttttagtgaaggcgatttttctctagtggcatgcttttatttcttgctttttaaattttgtgaatcttagtatatcttcttatttgaggctaccatgaggtttacaaacactataacccattatttcaaacagacaacactggttgcataaacaagaaagcaaagagaaaactaattaaaaactcaaacttcgtctcttttaatctttttgttgtttgtttatatctcattatactgtctatgtcttaaagttattagagttatttgttaactgaaagcttcctttttttactcttcttattcaagatatgagtagttcatacatcacaattacagtattacaatagtttgtgtttgtctgtacttactgagttttgtgccttcagatggtttttctggctagttaaggtcctcttctttccagttgataaattctctttagcatttcttgtagaacaggtctggtgttgatgaaatcccacagcttctgtcttggaaggtctttatctttcttgttggaaggagattttcactggatgcactatcctagcataaagggtcttttccttcagcactttaaatatggcatgacatgtcttagcctgtaagttttctgctgagaagcctgttactagttgttgttaagctttttggaatgtatcttttctcttgctgcttttaggatcctgtctttatccttgacttttgatgcttgccatctaggagccaaggcctgaagttgcatctttatgaatctatctggtgctctcttctattgtggcagagctggcacccaagccacaatacaaagtttgtcccattcttcctttcccatttcataagcagaggaatttttccccatggctaccactgcctcaggctcatggtgagtactgcctggctaccactgatgttcactcaaggcccaagagctttttagttaactaggagtaaacgctgcgaggcctgggtctctccgttctgtgcagtgggttctcctcaggccccaggtgagtccagaaatgccatccaggagccaaggcctgcaatcagagaacccaggagcttgcttgatggtctacctgactgtggttgagctagtacccaagctgcaagacaaagtccactctattgcctctcctttccaaaagcacaaggagtatatccccatggccaccacacttgggaatgcattgggccacacccaaagacagcatggctctgagtcttacccaagacttggtgaatactgcctggctactactgctgcttattcaggacccagggactctttagtcagcaggtgacgaattctaccaggactggattcttctcttcaaggtagcaagttcccttctggccctgggtgtatttaagaatgtcactcaggagccagggcctggaatggggggtctcaggactctgcctgatgccttatcctactgtggttgagcttgtgtccaagttgcaagacaatgtcatctttactgtccctatcctctcctcaagtggaagaagcagtctctctcaaagctgtcagctgcactgttaggggttagaggatggggtggtacaagcactggtgtcttactgggttgtgtgcccaccaagtcccctgacttcgagtccagcacgacaccaagacttgcccaggaattgcagtttttgtagcctagactccctttgaagtttatttaggaccccaaagtgcttgagctcacactggtgagactagctggaactcagcttctaactgctgagatgggtgatacctccctggatagggctggtctaaatgtgccctctatgtgcgcttgatgaattctgccctgtgttgcttcccactgtgacagggcagcactgggttccaatgcaacgtttcacaatcctgcgccctccctcctgcaagcacacagatcgtctacatgagacatggcctctgccaggggatgggggaggggtggtgttggcaattcgtaactgtctttcctaccatcttcagtgcctctttccttgatatgatattaaaatcaagtactgtgattgctcacttgatttttggtttttatgtaggtgcttgcttgtgtggctatctgttcagtttggtgtttctatagcagcggtagcgggaaagatgattgctggaaggttccatgtatttgaccgtcttgttctgcctccctcctagtaaagctattctttaaaaattctagcatgttagggttttgtgttatgttctttttcccatggaatttgaaaatggatctatttgagtagaatttcaaaagaataactcataatttttgtctaagtatatatgtggctggattcacaaagctgggcacacagggactggttggttgccgcaggtatcattgttccctgcttgaagtacccgggcatttacaggtcttgtcattgacatggctacctggttgtaggaatagtctaaatcctatgtttttaatcgtggaagtttaagggatgtcttttgcctggaaaccagggattttcttgacttgtgtgaaattcaaagtttatatgtgatccaaggagtgtatgtaaagagcacagtcacccaaaggctaatgttagacccatcacctgacgttttttggaaagtatttgttgatcccaaggcttgtgagagctcccactgttacatgttctttagtcctttctaatgcttctatgtaatagtaccttttaggaatattttctttgctggactctaagttctatagggtctgggcctatgtctgatgtactagcatatgattcagtacctagctcaggtttattcatgctcaatatgtctttgactgattaaattagggatttccagataggtgatgaaaaagctgggaattacctcatgaggggattgtagggttttaagcagaaaacgatttggtgaagtatgacaaaagaaagacaaatgttagaaagataatcaaatagtaggttataaaaggacaaggaagcaacataagattgaaagaacaagaacccagaattagacagatctgagccataattttggctttaccccattctagtttcatgacaaagagccacatactcatcttacatgagatacttagaggttaagtatgttactgctaatctcagaaatgccacaacggttatgaaatccactcatttaatagtgtgtctcatgagtatttacgttaaaaatgttaaatattatttattgactattatttttccttagtataattcctgagcaaagaactgagtaaaatagatgaaaagctctcacagggttgtttcaaacctaattaaacccgatattcctaaaatttgagttatccagtatgagaataggtcatagcatgcaaaatgtgtatgcacagcaagcatgttttgagtgataaggatgtcgaaccactctgactggtatattccaagaatggttaaactttatgtacccacccaggtagattgtggtcttttgcttctttgtgtatttacttttccctttacccgtaactgccttgatcatgcctgtattttttctctccttcatagaatctatattcatttcagtgaattaattagatcatttagggtataaatctcttactcttgctattcaaactaattcaaatagacttgacctatgataaaatttttaaattttttttgtcatttgaactttccttttttcatccgtcatcttcggcagattaattatgcacactaattatccttaaatatagctttagttttcaaaaggggataatcgtgaaaatgtatcattggaagtgtgctttgttaaattgagtgtattttttttaatttcagtttgggaagcagcatattgagaacctcttcagtgacctacaggatgggaggcgcctcctagacctcctcgaaggcctgacagggcaaaaactggtatgtgacttatttttaagaaagttaactttaaacttagtagaatttcagaccagaaactgacaacatagttttatgacatctagtagaatgactaggtactgattgaaacagcaatacctattccttagtaaagcaacctcgtatgattttcatttggcatactctaccgcctgcagaaaaagtaaaaatttcagtaatacaatttatattaatagatattattcagttttactacttggtatctatcttatcaaatatcttaatgaaggcttttatacataatgacttgagaaattatctttgtacttttgtgtatttttgaagttattttacaaggaacctgtatgagtttatacatgtgggatagcaaaataaggtacaggcattatagtgtaatacgtgatagcatatgtgatgaaaatatcacttcctcttgaactattatcttgtctaacttcagagcattcctgtgaagatacatgattgatatacatgattacagatcagtgaagtcatgttgatcaaggtcttacactggggggggaaagaactcaaattgaaatcccctgactgaaataatcgtcttagattgctattctaaaaagtagagtttaagcccccagtctatagtcataaataactgttctacctatcaaattctgctaaatcatagccttcgtctcttatctttgcccttcattacaactccccagcacatgcacatacacacacagacacacacagattttgtcatattatacaaactgaagctgtcgttcaaagtcagttagcaaaaatcctatctaccccagcctgcctcctgtaacacttaacgctaagccactcttttctcggtatatattgtcagatatctctgggtttttgcctgtattattttacttgcctgtatttctttttgtacttctgtctaccccaactgtctgccagaaaccttgatttcacctcagtaaagcttttcccaaattacctttgctaatttttccctcccaaattccacagaaggcccatttttgtcttgtttttagtgtatgtatgactgacatccctcctcaattaaattctgaagtcctatacagaagagacatacctatgctttcattttttatcttcagctatgtgagattaatactaaaacggatccatttttttcaagaagtctgaacttgtactaatagaagaacaacttgatgacatattgaaataataactttagtcaagggggaaaatcagatttaataccttatagctgaactgtttgctgggcgccaatttgaggtcatcatgtaaacttggtcttaatttcactagttagagatagatttgtgtgtaattcatctcctatgactgtgaacaatttacatatatatggatacgtagcatatgtacagaaatcagtgtgtctgtgtatctcgtttctcctgtattctgaagtcagtcctactttgttaccgaatacagaagtcccagtgtcttccaaatgttcgtgaaaaatctttcaaagattatggcttactcatcttgtcctggccctctgttaggaggctgttgtctcttcacttccaggtatctgcgtgatcacttctcctgtgttgcaatcctctggtcatttccctgactgagtcaatccatctatcacccaaagcaatttagtcagggttaacaaatttcatacataatgtttaagataatgaatttcagatcctttcgtaattcataagcatgatttgggtgtttatactcagatatgagataagcctttctctaaacttatgatgttggcacactacccatttgatataaagaaaaaaccactaatttcggcaaaattaaaaaatccacatgatttgcatttatgcatatacatacatagacgctaagacaaaatgaacctaattagtaatagcattaaagaaaaaaatatcaaacaaaatatccatgagattggccagtataaggtaagctagtggtagggaaaaatcaccaaacatttacacatggcagtgtagattacataatttcagatactgctactaacagaatccattcaccattgtttgtcctaatcacagatctgtcagccctggtctgaggattttgcctttctcataaagcagaatcacctctaacaaatgctcccgatcccagaactccaattcgctatgccttgtcttgaattctaatagtttctgtagagatatatcttctactcctaatgggaggcatgtatactatagaacagaaattttagtattctactcagaagcatctgcatttggattattggctcaggacatccccagggttaaaaggaaggtacttgccttacaatcataaaataagaaatactccccaaggagactctaataggggcagattttaagttcccacttcaggatcagaaactgcagctttttaaaagagtagactatgtttggttctaatacatatgcacatgtgtacatttaatgtttgaatatgatacaaaggaaaattttgctaaatcttgtgactatataattacataattgaaaggaaatatgtggctttggtctaactactaggcagagaactgatttgagtaattattttcaaaactttaaagtcctataattaccattaaacttgtatactgtcaatctatatatacacaagaagattggttatttgctgtttttctttcatgtattttttttttattttgatggaatcttactctgtcgcccaggctggagtcagcgacatgatcttggctcactgcaacctctgcctcctgggttcaagcaattttcctgcctcggcctcccaagtagctgagactacaggcatgttccatcatgcctggctaagttttgtatttttagtagacatggggtttcaccatgttggccaggctggtcttgagctcctgatctcaatgagccacctgcctcagcctccccaaatgtctggctgttgcttttttttttttttttttttttttaaatctaaagtcttatttttttcctctttttggtggaaagtgggagaaatatcagaatgtaaaccaacatcattctgacattcttggaggaaaatctaagaggtaaaaatggagattctggttcataaggttagccttaatgttttgtgaaatcaaaggaacaagatgtcaatactgtgttataaaggatatcaggcaagttaccttggagagtaagatggctttagcttaatttgggttgttcagcaggcagtgcaaatgataaggagttctagggtgaggaactacttgagaaagaccaggagctttgctggaaagtataggagttaaatgcaagacacagaaatatagatatttgtttggtgcatgcacaaggtagttagagaagaaggaaataaatttgcaagactggggctctacagacacagacaaaagtttgggtcctggctccaccaattattagttatatggtaatctatatattagatattttaacctgaggttcacttctgtacaatagggatgaaactaactgccttgcaaggcggggattaaaggtagtgcattcaaagtacttggcacatactacgaagtcaataatatttatgttggaccaactatgtgacaagcaccaatcttagtgctttatgcatatcgacacactgaattctgccagaaaccatatgtacaatggtttgagcaatatgaacaataagtagtgccctggacaaggtctggatcctgtgagacagcatgcttcatgtttgagtgagggctttgacctcaaatgcagagaagaaagtatgtcgaattctcttgtaaatcagagcagttgttattgagagcacatgttgtaacttgtgtatgcctcttgctaatattttcattaagtccatttttaacagatgagaaaactggtatacagggagattaaattttttatgtaggccagacagcacaaaaacagcagagctgacaattgaacccaggcagtcagctttgtagctcttgcccttaactgttacctataatcacccaaatgtttaggtgagaactttgcaagtggtttgcattggcagtgggcttacttcaggaacgtcattgttgatggtatgaaggaaggatgaaaaaaatggtgagtgagtggagaagggaaagaggttagatttctctgggcaatagctaataagggcttgtagtaaggtaaaagaaatgaaaatgagagtaaataaaacaggttatcataatggtagaatttctaaaactctacaacttaataaatgagttaatttgtatattacaatgaactatgcagatgttggtttaaaaattacaggataagatacaacttttgggattgagaataaaattagggaaccaaagtgattgaggtttagagcttcagtgacaaggacaattaaggtaatcttcacagaaaaggtttcctttaaccctatttggcattatataattttgctagagtcaaatctcctttagatttttctaaaaagtttgggaattgtttttctatcttactagaaaatgtttttatgcatgctgatgtttctgtcattggtggtcatgcagtaatccccaactgggctatagaatgaagaaacaatcataccaaaataggctttgtaaagaaaaagtgttgccattcttagagtggttggtttatgctaaaaacgtaccaggccaaggacaattagcgcaaagtatttagattcattatattaatgcctcacaggctctgttcgtttacaatattcaagcttaatagtgaaattataaatggtttcatttctagtagattgtcggtctctctgctggtcagtgaacactcttttgttttgttctcagccaaaagaaaaaggatccacaagagttcatgccctgaacaatgtcaacaaggcactgcgggttttgcagaacaataatgtaagtagtaccctggacaaggtctggatgctgtgacacagcatgcttcatgtttgagtgagggctttggccccaaatgcagagaaagtatttcaaattctcttgtaaatcagaccagttcttactgagagcacatgttgtaattcgtgtatgcctgattgtggctaatataattcaggaagcaaatgcatgctgccacagagggaagggaaaagacatagacctgacctgataggctgctccctgttttcagattttacttcatgaagctgtgtttggtggacaaagtcctgcagtcaactcggtttcttttcttactttgcttttctttttcttttttcttttcttttcttttcttttctttttttttttttttgagatggagtctcgctcttctgtcccaggctggagtgcagtggcgtgatctcggctcactgcaaactctgccttccaggtttaagctattctcctgtctcagcctcccgagtagctgggattacaggcacatgccactatggccagctaatttttgtatttttagtagagacagggtttcaccatgttggccaaggctagtctcgaactcctgacctcaggtgatccacctgcctcagcctcccgaagtgctgagattacaggcgtgagccaccgtgcccggtgaactctgtttcttacggcagtgttttgtgcaacaaacggatttttctataccaaatatttatgtactaaatgtgttcaaacctgataatgatgtttgtttaaatcaagccaacacttattaaacgctgtctccaagcatataaattatacagaaacatcactatttttacttggggtatgaatggcagatttgtttttttggtttagatttaactggattaaaatacgtgtgttgcattagaagaagtaaacagtcacagctaaaccaagtaggcaggtcagaggaattctaatctcctctgaaccacttggtgactcttcccctgtgtcatggcattggaggcagccttcctttcttattaacatcctaaaatctgtctaatcgaccaatacatttcaccaggcacttagtagctccctaattacattacctctctctttcaaagataaactcaagtacattgagtacgttgatcacttactcttaaaataaccataagcagggatagattaataataacatgtactcccccaaatgttgctcagcttatctggcagggagatgacattacataagatatggaaatggaaactgtgcagcaattaattggctgattttatgaattcagggtcattgtcacctttaacctatgaaagttattttacagagatgtttgtcttaggaagaaattaactagatttttcactccgcagccagaataatctatgagctgattttcttgtttattagtccgatggactctttggaaatatcagtgtcattgacattatgagaattgttaacaatattaaagttacacaaagaaaatgtctttgaaatatcaaaatatcatattctgtttcaaaatgtagcagtgaagaaaagagcggaacacagaattattagatttaatttatttgtagcttgactgtccccagcaagaaaatgtcatttaaaaaaacaaactttgggatatcctgtaaaactcaatcctgcataaagaaaatgcggtacaggtcgggcgcggtgctcatgcctgtaatcccagcactgtgggaggccgaggctggcagatcaccagaggtcaggagttcgagaccagcctggccaccatggcgaaaccccgtctctactaaaaaatacaaaaattagctgagtatgctggtgcatgcctgtaatcccagctactcgggaggctgaggtaggagaattgcttgaacccagaggctgaggttgcagtgagtggagatcgtgccactgcactccagcctgggaggcagagcgagattccatatcaaaaaaaaaaataataataatttggtacatatacagcatgaaatacaatactatgcagccacagaaaagaattagatcatgtcctttgcagcaacatggatgagtctggaggtcattatcctaagtaaactaacacagaaacagaaaaccgaataacacatattctcaataagtacgagctaaacactgaatgcacacgaacacaagggaacaaagagccagcagcagctagtgctggggaactttgagactcctacgtgataaatcatgaaagggtgtatggggggggtcttacttgcaagtatgttttgggaggttttttgggcacacatgctctggttgtacatgctagcacacataccacatctcattggcatctaaaatctccacccaggggtgtgtgggtttttttgtttgtttgtttgtttacactattacaatgagcaaaagaatagggcaagtttttggaggagtgtgtgcatgcttgtcagtggggaaaatccctagcgtggttatctctggcgagggcctgagaagtcccctttggggctagaggagcccaaccacaaggctagacataatcagtgtggacagtgtgtgtattcattgtccgtttcgctgattgtcaacaggcagcactgactcagtgaaacagcatcttcaggacttcttttctcaatggggctcccttgcctgctcatttctggctatctgcctactccaagggaaccagaaaaatcctggcaataaaacatatagaaggaaatttatatgactttgggataggcaagtatttatgatacctgaatccaaagcatgtttcaaaaagagaaaagttaacttggacttcatcaaaattgagttattgctatattctggatatgagccctttgttttgagttgcaaatgtattttccttttctgtggattacctttttactcacttcaatggttaatattaataaaaacaagttctccacttggatatagtttattctttaaaactttatatttttatgacctgttgaagaaatactggcctacccaaagccattatgatactatattaggttattatctatagaaccattatcgttttaccattttgtttttggatctgttttacctgaaattgattattgcatatggtgtgaggaataggttaagactcagtatttattttatttgaagtctaattaacacaccatttattaaaaataatgcttcctcattgcttcacagtactaagtgtgtcattaaaaatttgtccgtacatatgtgggtctgtttttgcacttcaattctcttgcattgttctctctctctctacacacacaaatatcatgtaatgtggagtaatgtagttttataatacagcctagtatctggtgaactaggttctcccactttgttcgagattttattggttattggccctttctatttttgtatttgttttgtaatcttttccatttacatgtacattcattttaagtatgattaacattgagttaaatctatagagaataactgacacatttacatatggagtatcccagtcttctgtttttcttgattttttttttaaattttaggttttctagaatgagaaactgaaattgaacaggaacacaaaaggtgttcacaaattcaagaatcatatttaagaaatgtttaacctcagcagtaacttgaggaaatttaaattagagctgtaatgagataccagtacaaaattaccaaaatgactgaactagactactaatgccaaatgttgatgaggacatggatcaactggaaatctcacaattaacttctggaaatataattcaggcaactaattaaagagttgggcatgatctactaaatgtgaaaatgcacatttcttaccacccagcaattctattgtagacatacaagttacagaaatacatttcccagtttgccaaaaacacatatatatgtgagaatgttcatagcagtttcatttgtgatagcccaaactggaagtgactatgatacattctcatgatgggatattacagagcaatgaaaatgaccaaatgatagctacacacaatatacaagatgaagtcgttaaaatgtatttgagtgaaataaatcagacaaattatacctactatgatttctttcaattaaatttcaaaaacgggcaaaatgtttccatgggtttaaaattgaagagagtggttaacttttggaaggagtaagtcagtaaaacgcataagagaatcttctgcggtgctcactgttccatgttttgacctgatagctgttacacatgtgtatttactgtaagaaaacgcatcaagttgtacacttatgtatatttttctatatgcatattccacttcaattaaaagaggaacttatgaagggaacttaaaacctccgaaactccacgggccatatatagaaatctgatcatagaccccatgttttctaatgaaattattaaatgaatataagtgaatataaaattagaatatgatgtcatatgaatctcttcagggaaggccacatttcttacagaaaatatagaacctcctaatgttttagtagggaaaaggccccaaaataatggcttaaatttgagaaggagttgttcaaaagcagatattaacaatgctttcatctgagctagagctttaatggggagctgcataagatgctggcctatgcgttagaggacaaaacctcaagacattctcatgcagaaaccaaacttggaacaaaggaacctttaccttagcctgtggctgaacaataacacatggattttcaaaagtaaatctaggctgggcgcggtggctcatgcctgtaataccagcactttgggtggtccaggcgggtggatcatgatgtcaagaaattgagaccatcctggccaacatggtgaaaccccatctctactaaaaacacaaaaattagctgagcgtggtggtgtgcatctgtagtcccagctactcatgaggctgaggcaggagaatcacgtgaacctgggagcagaggttgcagtgagtggagatcgtgccactgcactccagcctggccacagagtgaaaaaaaaaaaatgcattatcttataattctccattttgtcataagtataaacaaaaatggaaaacatccataagtacaactttagtttgcttattaggaagaataaatcaaaatgctcaagcaggattttttttctaaagttgagcttgggtgtgttctatatcaataagcctgtgcaggatataaataatcacattgaagaagtcctatccaaatttccttttaaaattcacaggtatataagttgattgattggtgtcagagcaaacacaaccctttgtgtgtcagagattacagccacatggtaggcaatatgaagcatatatacttaggaacagttaagtgaataaaaaagagatacatagaataagaggtctgagaagaccttttggttcagttcctatatgagcagagacctggagaaagggagtgagccttggaattgtctataggaaggtgggttaggcacggtaataaagaccttaaggtgaaaaagcatttggaatgaggcctcagcaagtggagtagagtgagtttagagataaaggaaacatagcagagataggggagcagagaggtagtaaggtgggggtgagaagaagaaagcatggtgagccattgttggcatttggactcaggtctaaatgagatgacaatgactaaaaaaacactactagaaattaaatgggtcataagtcaggttattttaaaaatcagtaatagttccaagtctttgctattgtgaatagtgccacaatgaacagatgtgtgcatgtgtcttcatagtagaatgatttataatcctttggatatatacccagtaacaggattgctgggtcaaatggtatttctagttccagatccttgaggaatcaccacactgtcttccacaatggttgaactaatttacattcccaccaacagtgtaaaagcattcctatttctccatattctctccagcatcttttgctgactttttaatgattgccattctaactgttgttaaatggtatctcattgtggttttgatttgcatttttctaatgacaagtgataagcattttttcgtatgtatgttggccaaatgtccatcagtgatagactggattaagaaaatgtggtacatatacaccatggaatactatgcagccataaaaaaagaatgagttcatgtcctttgcagggacatggatgaagctggaaaccatcattctcagcaaactaacacaagaacagaaaaccaaacaccgcatgttctgactcataagtggtagctgaacaatgagaacatatggacattaggaggggaacgtcacacaccatggcctgtcagagggtggggggctaggggagggatagaattaggagaaatacctaatgtaggtgacgggtctatgggtacagcaaaccactatcgcaggtgtataactatgtaacaaacctgcacatgtaccccagaacttaaagaataataaaaaatataaaacaggaaaaatcagacaaaatgaaaaatcagtgatagaatactaacaaacttagagtgtcattttattcaagaaagttacagtcaataacgaaaacgtatcgcacagtagaaatgctgctaaatccatgaagaaaaattgatggaaatatatttttagagccattaattcaccactgtcaagtttatgacatatttaacagcaaaagattgagagtacaaataactgtaggtttaatagtgattttctgtatctcaacactaaagcatagtagatacttctataaaatatgagcattatcaataaatctccctatgaagttggatgtgcaagaagagcaatagtttaaaaatttcagttacattaactaaattcaagtctgaactctcaacaaggcattcagaaaatcgtatgtctgtcattattgggaatgctctcccctgagcctatggaatggccagagctcagtagatccacatggtgtctttcatagggcaaaagcattttcattttcagttcattgaggcaaccaagtgatacattcactatacaattttaaggtatcttgtgaagtcaagtgtattaactgtcctgatattaaacacgtggcatacagaaaaagttgaagagagtgtaatcaggggaatatttatagaaacgtggggaggattaaaggaagaaactatggtgaagaatgcagggattcacatgagttaataacctttactacatctaaacctaagcagtcaaggggagagggctattaatttgataaaatccctcatgttgggagagcgccactggacacaactgtgaactgagcccctaggtatctaaagaatgctgttagtttcaaatcattgcctggtgaagttgagagaagtgataccttagtctctccatagaatcctccagtgttttgccagtgccgctccttagtttagtctaaccagaagtccaaggttaagagattccaggtgatgtagtcatcacatacaaagaagaggtgaagaagtttggtgggttagtgaagtaggagtggaaaacggtataatcggcattccaggtatctagttctgttttgtttctgtgcgaaatgaggacttgagaatctgcatgccgagaactctgatgttggctagggcccagtcttgttggatgcatcaggaagccagtcacctttgaggccataccacttctatttgatgacagagagtagacgtggtttctggctaatttggggactaaggactccttcctattcttctggagacaaccagagccagaaaagaaagacacgctgagagtcacttcggatatctgctcttcgtcgtaaacttgttaaaggcttaggaaaatagtaaaaaaaatttcctgccacatacacaaattataaacgggcaatatatttgaatgcagtgaaaatgtcattaaatacacacaaactttcaaaattcatgttatttaataacagtagaaactaataatatacttataaattaagtttgattaaggtttgttaaaccaagagtataaaactacatttgtgaaggaaaaagcattccatatgaaaacccatgagaaatggctcaggctgtactgagagtttgaatttttgtctttgattttgatcttcattaaaaagataaattgaatcaagctttcaaataaaaatgttacaaaaatgctttaaggaaagcaggaactaaagataaagaaatagaagaaacactagataaaatatacagctagttccttataatatgaaatagattaatatcttatgaatgtgatccagacaaggagggagaaaaacaaatgtatgcagtttaaaaatggaagggaaatattaagtatgagatatagaaaccaaaaacgggttttacacagaaatacatatatgtttattataaaaaatgaagttgaggccgagcgtggtggctcacacctgtaatcccagcactttgggaggctggggcgggcagatcacctgaggtcaggagttcgagaccatcctggccaacatggcaaaaccccgtctctactaaaaaaaaaaaaattagacgggtgtggtggctggcgcctgtaattccagctactggggaggctgaggcatgagaatcacttgaacccatgaggcggaggttgcactgagaggtgatcataccactgcactctagtctgggggatcgagcaagacttgtctccaaaaaaaaaaatttttttttgaataccagtgataagtttgtccacacaccaagaaattgataattgctaatagaaaatcatatgaacagcctcctaattctataaacctatgaaaagaaaccctggtttaaaaaaatcactcaaaatttagccctctgatttttaaaggaatattagaagtgtcttttcaaaatgatactttttggtaatttctggatcattaagtcaaggtcattttgtcttctctcttttccttagggtctcctccattttagcctgtccctctgccataaatcactagttctagcatattctgtagttctaaactagctcctcagtttaaccctgttcctcagtttctttcctttccctgtcctggcgtttaacctgttatcctcacttgaatgccactcagcttatatctgtagagctcagacactacgtctgtgttccaatttgcattctttgtggtggctgttttagcatgaagttatccctgctgtcaataatgtattttggaaagccacttattgagaagaaagtacttctaagtgcagtgataactttattgcggtatttgctgagagcaaagctcatttgtaatagttggttgtgattttaaaaagcgaacaaaatacaaaatcctgagaaatgggagactatgctactaagtggttattcttgtctctacatcagctctaggtaaaaatgtatccacagcttctttttatttacaagtttttgaaggtaaagcaaatcccagctaggatgaaacatctcttatacagccattctattatttctttgccctgtcccacttttgtttgtaagtagtgcctttcattaggcattttaaattcagttctacacttaactctattctctcaaagatatttaatgggtaatttaaactttccttggatataactaagttctaatcagtgagtattctctattagatatttgcacttttaataattttgtgtctagtttaatgattaattttttgtctggtaaaggaacttagaaattacaaatttgatagagatttaactgtggtgctttaaactaccccccgctccccaagatgtattatgatctgtcttcctttctccaagcttgtgtcctcgtcttccctcttatgatttccttgcttacattttatgaattccgatcccttttataaagattcatacaaaaggtatagtgttgaaatataccctaggaacattaccaagacttcgctgacttaatataatttaatattaactgacacagttgtagatctaataattatgttcattgtaccagctcatcaattgtctatcacaaggtggtaagtttttaccaagtaacttcaaatctacaatgtgggatactacaaagcaaatagtcattgctatacattaaatcacaaatccaaggtgagtatttaaaaagcctagggtggaaattcagatgacagctatgttcaaatattcacttaaccccatcattgaaaatagtcactgaattagattgaatggttgtcagatgtcactgatctgaaaaatgatatactgttcacatgctggcatataatgttagataaagaggattctaaaatgttctttaaaactagtattttatgtgtcctttaagtattcagaaacttaaatagccatataatacatattttggagcatgtcagaatatatttgactataaactacttctatttattactcataaaatctagtatttaagtacaaattccaaatttaatttgttagacaagtatttcttacacaaaattgtcagtccacacaataggcctgtaaaatatttgcactttatatgtattaattctcaagtttgcagaagaggtagatcttgttaactctgtaacttatcaactatagggtctttgccaaatgattccgtgactttgactcactttatcatctgcgaaatgcattaatagtaaatgttcacttctttcaaaatacttgttatggaagatacaaatatacaaacataatctcgtattcattaaactcacattcagttgcaaggtaatataactactcttaaattgcagcatgttctcatttaaaataattttctgggtgagttgtttattcttcccatcccccttagtatacctcttgctttaagggaaattagtattgacacatttcttgtatattcaacttcaaattgagatagccagttacctattatgttcacatatggaggtctgctgggataataattatataactataaatagtactgtttaaaaatatttcttataatgtcactcaagtatcttttaagatttttattgtagctattgcttttttttttttttttttacttgaaattagtatacgtgacttgagcttaaaaagttggggctatatgggttgatttttgtcgttaaagttacatcctatattgccagataaaagatacgtaattacaaaaattcaaattaaataatatactgaaagtatatatatctttcatactaaattgtgaaagtattgaggacagtgtccatttactcaggcaatgccctctaatatatattctatataaggaattttgttgagtttagttaaaagagctactttcccaaaaagtttagtttgcattttattaatacgttcaaccagattacctgtatcaaaacttctattttgataaatttgttttaatgtctttcatgccattaaatgttcatattttcttaggattatgagacacttgtattaactgcctcaattctttattgtcaaagaggcagtatataaacaaatgaaaacatgactccattaaaaataattctcctgcaatgtatcagagtgatcataaacatatctgaaatatagaggaaatttaacatttcacttgtccataagcaatttgttgaaagtctattttttaaatttattcttaacattctatgcgtggcatatagtgagtggtcaaaaatagttaaagaatgactaaatatgtaaaacttaatcattgaaggtagagatagtatctttgtagtgagtacccagaattaaatcttgtaatatagttgaggtcaaaatgtgcttcaaaaattatctaatgtaaatttctatatctgaatcaaaaataattcttgaaatacggagataaggaagggaataaaaagctgtcattggaaatccaggtccacagtggcaatatggcccaccgtttaggttgtatatatcgacgtatttatgatttaataagaaaaagattcaatacatgcatctctcaatggaagaaaataggtatgatttatgcccataagtcttgaaattttaaacagtgtaaatcttaaatgtggtgtaaaagcacatgctgcagggcaatgaaactactttgcctttcctgtattttttatctttttaaaatgcattatatttagaaggattgtatgaatacttgagaagtttctcttgaatatggagaagtctttagcttggctacatgatggcagacatcttataaaagacatttaacatgtttaaaaagcaaattctgtttatctagaatgttggaaggaacttctcggtttatatatattttatgagaacgaaatgaaatgaaaagaaatgaaagaaccaaatagatggtggaagtacatgcttgaggtttcagtgtcaggaaggatatttacataataattttcaatgcatgggatttcccttttagttattgtttaagattctgtttaaggaaatcaactcaaacttttaaggatatttcagggttcctttcagaatctttttgtgaaattattttataatagtttgtaccatttcatatctagttaaaatcaccaagactgagtgaaaaggtagcttacccttatccccctcccttagctaattttaaaaatgcttgtattttacactgcatatgagggaacaaaagtgactccttcttaggacaaatatcaaactctgaaatgatctgggagaaccaattcctttgaaacaaatgtgagaaacgacctgctttagtctaatttcaattggctgaatgacgcaggacgtgttttcattagagcctgtagctctgaaatgtccttgtcactggttgtctaaaaaggcaagaagaggcagacaccatatattataaagatgatggttcccctgtgaatgagatataactttctgcaacttccaagttaaaaccgcaaatgcttaaatgatacacaaaactctaaacatccatctctctctgcatctaacaaaaataaaattgtatgaaaaaattcattaaagctttgtcagaactttgtcacctgtctttttctctctctcatacacaaaccacacatcacacacacacacacacacacacacacacacacacacacacacacacacgtaaatatcttacaggaatgtaactcttagttttattcatcattttcccttctctctctccttctgctctgccctaagaacttccattttcattatttgacttggttattgaaattattttcaagttacatgcccctcattctgacgtcttatttactattttctgtttgatgaaccctagtctgctattcttctttctgtaaagcaaatcaaaaataacactaacttgttcctgtcaataatctttcagaaaaccatcatatttcaggtttactttcatcttaagtttttcttaagtattcttaaatcttgaatatatcaatataataagtataaatccttttactgtaaaccatcatgggatatctaatcttagcttgaataaaatattgacgatggtagaaattacatccatgttcctgaaggaaagtgggataaaagaaaacagcgaggttttttgcctgtctcgaacaagcaaatgacgagaattgttcctcatagcccagtcatttaggaggtagagtacctggaagtaaatgctccctgaaatgattatatattaatcttagaattactaaatatatattgttatacaaaattatgtattgtaagtactagtctggcgatagaagagggacccccttaagttcttgtcctatgcctttaaaatagacagcaggagactactccatactaaagaataatttaatgtattaggttttctatgtgcaattcttacagactgcttattgtaacttgaggtgtttctaaagagttcacattttaatattctactggagtcacaataagtttccattatgtcaaagcaaaccatggaggttttctatcctccaaaattacatttgaataaagcaacttccgaagataacagtgtaaaactctgagacagcatcccatgttactttatgagtaaaatcttaggcctgttgacaggaactacaaaagccaattgtgctgcgtagtttaacttatttctgcaaaaactcaaggcatgttattacattttcacacagaatatcaattttcacacctattttggtatcagatgttttcattgtgcaaaacaggaaagcagaactttgggtaaccacagtgaccctactatttaatttccaaccatagagtgcttgtcacaacactgatacacacagtaggctcgtacattaacatacatgtcatattaatgttttctgttttgcttagtagacagatgtaatcattcacttcacacagattttaaaaggttttaatatttttaccattcagttatttagcaattagactgataattcttgaaagacataattctggaatgtgtattagaaaaaaaaacataaaagagaagttactgtatggcagggtgatgattatttaagaggaaatagtactgaattcagaaaaatgttatgacttacagctaatagtaagaaatacagcattataagagcaacaagcttatgagaattcatggccaaaacagaccagaccgtcaatgtgaggcattgaagagtaatataaatgccatgaacaataccctttcaggcatgacaaatacctccctcctctagagtcttcatggttatcaattagcatttcttacactccttggtagtttgaagaagacatgtacaagagacaaaacacaaccaaaataaataataatccttgtctgtatcatggtgtgaaatgtttattaacttggagagagagcctcttaaagctttttgtggagaattcactagatgtaattaatgaaatatcttctatccagacatagttttaaatcagaccttgtggaagcttcatttatctttgatactctgtttccctcttggtaaaatgcacataaatgtaaaatgttcatgaactcttggtaaaatttatatagctcatacatactctaatgatgtaggcatagtgaaatctgtattcagagagaactgtatagccataagatttttaaaagatggaaataaaagaagtatgcatcttaagaaattgtaaaaatagaaacaaaaataaaaattgtattcaacgtagaaaattgaataagaataatccattcaaaagtgagctcttgaaaagattaacaaaataggtaaacctatcccagtcataacaaagaaaacttagaataaaaactagacgagataaatgagaaaagacgcatgacagcagatacagaagaaatgaagtggaaactaaaagcaattttataacaattttgcaaaattctggaaaacttgattttctcgtacaatacaaatcactaaaattgagataagaataagtggaaaattagactgattacttcagaaaacatttagtaggttattaaaggtgtactgttgaagagtgtagtaggattctttacaaatgaatttaacgtaacccttaaagaataatttatatactttaagctattccaaagcatatgaaaagaaaaaaactccacaattccttttgtgatgtcaggttaacctttgtacttaacagtcaaaaagcaaagatcataaatctgtaagacagttttacttttgaatgaaatacaaaattttgttgaattataagaaatataatcacattttgcaagtggtaagcattctacaaatgttatctcttatttaccaagagctcttaaaattcaagaaggaaaagaaaactaccatatagaaattaatgagcaaaacatattaacagacaattcacacatggaattgtaataggtcagtgatacaaaaatatattcaaatgcacaaggaatcatggaaataaaagttaacaaagtgatgtatttgatcatacaaacaaaactaaaagaatcaaaaacaaaacaaaaatttcctggtgagagaagagcctattcttatacattctggttaaaatatgtaattctaaattgtttctaggaaggcaggtggaaacacctactaaaattacatatatatgtgtatatatgtgtgtgtatgtatatatgtatatagatgtatacatatgtatatatgtgtatagatgtatacatatgtatatatgtgtatagatgtatagatatatatgtgtatatgtgtagatacacatatacttgtatagatatgtctatatctccctgaaatgatgcgtatatatatatgtatagatgtatctactagagcagagtgtgtgtgtgtgtgtgtgtgtatacacacactctgatccagtatatacatcctgtgaattgttataataacagtagaagcatcagtatctgaaaatgtatgcataagatattggccaggtgtggtgactgctggtgggaatgttaatcaattctgccattgtggaaagcagtgtggtgattcctcaaagaagttaaaacagaaataccattcaacccagcaacctcattatttggtatatacccaaaggaatataaattgttctacgataaagacacatgcacatatatgtttattgcagcactattcacagtagcaaagatggggaatcaacataaatgtccatcaacagtagactgattaagaaaatatgctacatatacaccatggaatacaacccagacaaaaataagattgtagcaacatggatgcagctggagccgttatccttagcaaactagtgcatgaacagaaaaccaaatatcacatgttctcacttataagtgggagttaggctgggcgcagtggcttatacctgtaacctagtactttgggaggccgaggcgagcgggatcacctgaggtcgggagttcgagaccagcctgaccaacatggagaaaccccgtctctactaaaaatacaaaattagccaggcgtggtggcgcatgcctgtaatcccagctacttgggaggctgaggcaggagaatcgcttgaaactcgggaggcggaggttgtggtgagccgagatcgtgccactgcactccagtctgggcaacaagagcgaaactccacctcaaaaaaaaaaaaaaaaaggggagttaataacaagaacacatggatataaagtggggaacaacagacactggagcctactcaagagtaaaaggtgggaggagggagaggatcagaaaaactacctatcaggcaccatacttattacctgggcgatgaaataatgtgtacattaaacccccatgacacgcaatttacctatgtaacaaacctgcacatgtactcctgaacctaatataaaagttaaaaaagagtagctgtctgccactgaatacaattctgtccctgaatataatatctccaattcccaatcagttaattaccccctagtgatctgaatgctttctggcatgctttctccacctgatacttttcttcattccaatctattttttctttacagatttaatcaatactgagtacatgaatatatcttatgtcttttgcttatcttttcacaatgttacttcctttttcttaccccttgggcttccgtgagacacagttgcctacctaattgtttttcctgtggatatagataaattttattggaaaaaaaccatgaacatttatttaggtattatctgtggctgctgctgtgtgtgtgtgtgtgtggggggggggtgcgatgtgtgttccaatgacttattttttattgtggtaaaatacaaatgatgtaaaatttaccatataactattttttattttttaattagcaaaaaaaattgtatataccatgtagcatatgattttttaaaatatctagatgttgtggaatgcttcaagctaataaacatatacattaacttatatgtttatcatttggggttgaggacacttaaaatctattctcttagcaattttcaaaatacaatattgttattaaccaaagtcagcatgttgtacagtagatctcttgaatttattcctattaaatgtaatttagtatcatttgaccaacatctgcctaaccctcctcctccaagctctatcccctgctaaccaacattttactctcaattctatgagctcaacattttaaaatttcatatacaagtgacatgatgtaatgtttgtctttctgtgcctggcttatgtcatttgacgtaacgtactctagattcattaatttcattgcaaatgagaggattctctgctttttaagtccgagtagtattccagtgtgtgtgtgtgtaggtctgtatacctgcattttctttattctttcatctactgatggacacttaagttgatttcctatcttcgctattttgagtagcactacaatatacattgaagtgcagttatttctttgacatattgatttgtttcctttggaatatatacccagcagtagaattcctgaattatatggtagttttatttgtaattttttgagaaacctccatactgtttttcatgactacaataatttacatttccaccaacactgtgcaaagattcctttttctccacatctttgccacaacttaccttttgtctttttgataatagccattctgtgtgatgtaatatttcattgtagttttaatttgcatttctctgatgattagtgatgttcaacattatttcatttatgtgctggccgttggtttgtcttcttttgagaaatgtctattcaggttcattgccctagatagggtttgaggtatcattttttctatttttttagtgtataattcagtggctttaagtatatttctgttgttgggtagtcatcaccgctatccatctctagaatgatttcatcatcccaagttgaattcatactgattaaacgattactctccattttcacctcccctagcctttaataacttccattttttctctatgaatttggctattttaggtacctcatataagtagaatcatacaatatttgtcattttatgtcttgcttatttcacttagcatatgtttccaaggttcatttatgttgtagtttgtatcagaatttcattcctttttaaggctgaaaatattccgttgtatgtacataccacattttgtttatccatttatctgtagatggacatttgggtgttctcacattttggctattgtgaataatgttactatgataattggtctaccaatatcttaatctctgtttttaattattttggttataaacatagaggtagaattgctagagcctaatggtagatacttttttattatgtgaccttctgttgtgaactttttgacactgggggggtagtaccttactttcctttatcaggtctgagcccagtacctgaatatagtggaaattggaccttatgagaccttttatgaggacaaggaaatggaggaactatcttcctgcttacacagtgacaagtcttatgacagtggataaggggttactggaatctaagttcctattacttgatctaagtctccccagagtcaggtccatggcaacccaaaacgtatctaccagcagtgcttcccgcagtatgagtgagtatgtttcctaaaaatagcatattctctgcttaactgcttgagtctttagtgctatatcatctgattgtcactatcactagaattaagtttcatgaaagcagaaggtttttacttttacatgctcttattacttcattgcctggcagatagccaaaaggtacttgttgagttagtgaatcaatgaatcaatagataaattcatagtggcttttccttatggaggaatttctctcctctactgccatatgaggaatccccagatgatgatgcagatgatgatgctttcttattcttgaatgatcaatctccccttcgatgtagtaacatcttataaaactaaaatacgatatcatgaccaagatgtcaacattcataaaaccaccaatagtattcagattttcccagctttactcatatttatgtgtatgtgtgcatgcatatgtgtgtatttagttctatgcaacattattacgtgtgtaggtttgtaaatccaccatcagagtcaatatgcagaacagttccaccattacaagggtccctcatattgcccttttataagaacattcagctaccccacatcttactcccattcctgacctctgccaactgctattctgttctctatttctgtaactttgtcttttcaagactctcatagatacggattcatacagtatgctaccctttcagaatgactttttccccacttagcataatgcccatgaaattcatccaatttgctgcatgtatcaatagtttgttcttttcattgatgagtgttattccatggtgtggctgtactatggtttgtttatctacccctgagggcatctgggttcccagtttggggctattacaaataaacgtagtatgaacacttaggtgcaggtttttgtgtacacatgtgttttcatttccttgagataaatgctcaagagcccaattaccagattgtataataagtacatgttcagttttgtgagaaactgccagactgttttccaaagtggctatatcatttgagtttccactagcaggggttgagtcatccagtttctccacaccctcaccagcattttatggcactattttttaattttaaccattatgataaatgtgcagtgatacattattgtggttacaatttgcattcctctattggctaaaaacattgaacatcttttcatatgcttgcttttcagatgcttgtgtttaactttactccaccttaaacatttgaggagtgtgaaggacaggagacacagagatttgccttgattaaggcaaataaaaccctgccagattttcatttccaaacacagtcctagacagagataagagagctggcagtttgctccattgtttattagagacctaacattcattctaaaacagaggcgttttactaaaatgcagtcagccttaattataatggcactccttggagctaggtggaagtactggtgaatttttctgagttgtaattccatactagaaagcatatcttaattttaaacatactttatgacattttatttggagatactccagttgacctctttaatctgcagtaatctattcatgtgctgaaagtaaatatatttggggtgcttgtttgttatggaaagtgattttacacatgcattttgtttaatttttagattattttcaaaaagcttcaatgctaagtctctgaaaatagctaaatgcaattaccttcacgtttttattattattattattgcaactaggcatttggtctcttaccttcaaatgttttacccctttctttaacaggttgatttagtgaatattggaagtactgacatcgtagatggaaatcataaactgactcttggtttgatttggaatataatcctccactggcaggtaagaatcctgatgaatggtttccttttgggtaacattaatcttgttttttaatttttacccttgacgtgtgaaacaaatgtgtatttctaacaataacaaaccctgctccatagtgctgctttttaaattgacactaccatgtcgtctgaaatgttaaggatcatcacggtataaaataggttctggtacatttacaggaatatttttcaaaattttatttcattgagtaagtataaggtaaaaatacaaagtcccaatcataggtgagtaatttttttcacaaatgtatgttctataacttgtctataagttaatttagtatgttttattttaatcactaccaaaggaatgaggctttctcagtcttgggtattcttaacataaattattgccaataaaagattagtagaatatgggtatctctatcaataaatgtgtgtaatacatacaaactccataatgtgatttggaaattatttttaagtcacctgagcatagggtcttccgactgtctatttgacctctgcaaaatgggttgaaggatttgtggaaaagatacagacacacacccgtgtgtgtgtgtgtgtagtatatatgcgtatatatataatgtgtctatatatacacacatatatacaatatgcatgtgtgtatatacacacactcatatccacacattatatatgtatatatatacacactcatatccacacattatatatgtatatataagaccaacatgaacttatatccactaatattatccactcattgtatacatatacataatagtataatcataatatgtatacataatcatacatgaacttatatccactaatattttccactcattgtatatatatacgtaatagtaactcgttatacacatatgtataaatatgtatgtgtatatatatataccaacatgaacttgaatttaaacttccacggttaccatcttagtggcatttggtatattgccacccctgttctgggccatggtcccttcactatcaaaagagtaaaaataaaaataaatgtgtatgtatttcttatcacgattaagtgggagaatatctgcaaggcactcagtgtagtataccacttttatttgaggtgtatcatatgacttgtattgattgcttaaagttttccactcatttaaaaaatttggaggctgagaaatgactgctgtttttactggtcgggattacttttttataaatcagcgtttttgaaatgtaattgttagaccatcaatgtactcattctaagtgtaaaattcaatttgcatcaatctggtttagttctggttcttggtagcctctcaaactattttgagggatgaataactcccccccaccacgttcattaaaatttgcaggatatttacagagttatatagccatcatagcgatctaattttggcacttttccaccaccttaaaaagaagtttcttctccatttacagtcatttttcactcccaccccagccctaggcaattgtcaatctatttctgtccatatgtatttgcctttttggatattttatatcaatataatacatgttcttttgtgtctggcttcttgcaatgagggtaatagttcagatccagccctattgtagcagatatcatggcttcattcggtaaacttgaatttttttattttttatttttatttttttttatttttattttgagacagagtcttgctctgtcgcccaggctggagtgcagtggcgcgatctcggctcactgcaagctccgcctcccggattcacgccattctcctgcctcagcctcccgagtagctgggactacaggcgcccccccaccacgcccggctaatttttttttgtatttttagtagagacggggtttcaccgtgttagccaggatggtctcgatctcctgacctcgtgatcctcctgcctcggcctcccaaagtgctgggattgcaggcatgagccactgcgcccggcttgaattttaacttgaattgtagattgctcttgctcagagtcaaatagtgagtagacacaaagagtacctattaaattcagcagccatgttgctctcctaattggcccccatatatttttattccaaattctctgaacaggcttaatgctacttcacaacagtaagcggggagaggggaagagaaagagcgggaattaatatgtgctggcaacaaagaatagctcataggagccttaagtgagcccaagttggccgattttcagcccgttccatatagtgatggtgtcaaatagaaccagcaagcaacataccgcatctctccccaaactgcttttcatatgttgctcagtacttctcaaaatatcttgaggaaggaacacttttcccctaatccattgtatgtaagatagaataaaaccaaagcgttacaaaaataagatgcccaacacccatgcttcctcctttattattaaatacattagacataaatggtactctgtaaaatcgctacataagtttcttgatgcactctgaattgttgactttatcttatggcatagtaacaaataattcctagagtgaatccagtttgcagatcccgctttgcgtaagacagatgtaagttttgacaaagccagcagaagaactcaagcatgcacagagctccaaaaggcactctgaactgtatttattgtttatactacttcttatatgatcttaccatttttaaaaatatcctgaagccctttccaactccatctgaactagtccaagataagctttcaagactattatgtctgataatttcttcacttgcttgcaagttgttcatttattattatttttttattttttatttttgagacagagtctcgctctgtcacccaggctggagtgcagtggcgcgatctctgctcactgcaagctccgcctcctgggttcatgccattctcttgcctcagcctcccaagtagctgggactacaggcgcccgccaccacgcccggctaattttttgtattttgttcagtagagatggggtttcaccgtgttagccaggatggtctcgatctcctgaccttgtgatccgcccgtctcggcctcccaaagtgtttggattacaggcgtgagccaccgcacccagcccatttttcattattagcatgtggaggcgcttttgcaatgaggaatatcagaaggaatgctttttaaatctttctttgtctgagacctctcttatagcctgttgtttttcatttatgcccttgaatcaccatatccttgagactgcaagactgtagactcttcccagcctctgcttacttatctcatctctcttatatcacactgccctgttctaaaactattaagcacactttgaaaaattatcttgctcagtgttcatcataatccagtgaatctaaaaatgtgtttttcttttttttttttttttttacaccaacattacatattttcttcctattaaatggtagaagcccttgaatttcagcaaagattaaaggacattttggtcaacttaatgtacattctagatctatcagataacgagcggcatttacagatagaaccatgttggcccctttttctaatgcaacatactatgttattaatagtgccatggaggacttctcattgaacttgtgaaaactcaggaatgcaaactctgttttcctattactgtttttctactgtccatctcaaataaaattgctagcctaaaacagtaacgcatattttgtaacataggcaggtttgaacaaaattgcaaagcatataacatgtgtttggcatctttttcttccttcttaagtgcaattctttttttttcggagtgctaaacttggctctggcaaccagctggttgtaataacaaatcttgctaacagtggtgagctatcagaagtcaggtccatacttttactggacaattcaagggatgtacttaatggcaacgctaattcactttagaatgttcatattattgatacaatttgcaattacaggagaatgatgacgttcgcactgctgaaagccatccctgtaaattcctgcctaccaagtcacttctgtgcaagacagttcttgctctgctcttctgcagagcttcacagaaactatccttaccatataagattattcctaccctcttcatttctattcctctgctgcaacttcttttaatcacagtctgggttctggggagtagacttcggagttgagtttggcaggcagcatgtttattaagccatgccctggaaaaaaaaaaaaaaaaaaaaacacctgtagaagggcagaggtgacaggagtggaaagaggaagaactagagctgtgacgtagaccctatgacacgcttattcaaaccccatagacaacttgcagctaggatgacccctcagagttgtctcaaatggggttaaaatggctgagtgtttatactctgccccttcatcagtcaatagtagtgggttgccctagagagggtgtgacattggctggcaggactctgcaactcaggtggtacctgagagaactaacaactagaagctgcctgaccacagctggagcaacaagcccttccttgaaggtcaatcttggtggtgcacctccatgtccatcatgccttcttggcccagttaactcctagtcatttttaaaaatcactgctcaaagacatttcaacttttttccttttaaaaattgatttatagttgtatgcgcgcacacacacaaatacatctgtttaaattgagcctcctttagagacagtgagacctgaggacgggacagttttctgtttacaggctcacctttggggaccagctcaatgattttttgataactgccttttatgtaggaaaaggagacatgattatcatacattgccctttattatttttttttgtctgagcaacatttgcacctaagtagaagcaataacagcgaggctgaggctgataagctgaattagtgacataatgatgctataaaggagttttggattgaatactttgttgtcctttaacgttatgcacatagagggcagactggccaagcatttcacaaatgaatcacattcatcattggaggattgcttgattattgcaaatccattaccaccattaagccactatctgctgattccaaccgtaatttagcacaggacacaaaatacacctcctgcagtcactgtacataaaggttgagcaatttataattttagaatatgagacaaattacgtaattatttgacctgtattcactgagtaactgactaaataagtaggtcaagaaggaattaggaaaacttggataatccactcctaaataataggcttagttatcaagggattgtgacagatacatgcaaagatttcatatctccgaatcgttactgtgtttacaaagcatcatctcaaatcttttaaaagtatgttaaaatgagatttagtagtatatcctaaaatttgcatttactttttaataaaaagatgactaacattggagatgttaaaatatgcatttaccccaaaggcatttgttaacttctatatggatgaaaaaataaaattgtcatatttagaatgcacaataaatattcatcatctgatcaaatgttgatagtatatgaaccttaaccttcccagaaggaaagtgcttagtggtacagactgatcacttttacatagatgtcttcttccagcatctcataaggggcttatatttaaaaagcagtctttaataaataataattctttaataaaagatgtagacagttttttctatgaagcgtcactgcattcatgaaacttagaaaaaatgcttagaatggatttctgcatcagatgactcagaagaattaaacttgataatctgttgaataacatctgcacatgcacgaagcctatgagacaatcaaatacatggaaaccaagtaatgaaaatagaaccaaggctacatatgtacacctcttagggataaatatttccttcctttgttgttttttttctttattttaggtaggcaaacatttctgtcttcttttcagttcagccaataaatatagcttgcgttaaatgatggtatgaaatcaggggttttatctgaccatattttgtactttgatcttacactaaccttgcatgtaagatacacagaaatgaggcctagaagaggttaagcaacttgtccaattaccacaattaatagcaaaggcaaaatttgaacatatactttaaaaaacaattatctatagtattcctcctatccaaaaagcgcttttatatcttaagtccttggttaacaataagtctaatgttttatacactgtcttctctagcttgttcattgaaagctagaaggtgagcaattctataaacagtaaatgttgggtctaatatggcagaatccaggagtaatagtgaacacattcagtaaatggtatggcatagataccaatgaatcagaatagactcctagcctttgagaatagacttaacttctggtagaatctattatgtctcattactaattggccctaaaatttctatttatcactgaagatcaaggacattcatatttaagtttgcatggttcttgctcaaggaatgcattttcttatgaaaatttatttccacatgtaggtcaaaaatgtaatgaaaaatatcatggctggattgcaacaaaccaacagtgaaaagattctcctgagctgggtccgacaatcaactcgtaattatccacaggttaatgtaatcaacttcaccaccagctggtctgatggcctggctttgaatgctctcatccatagtcataggtaagaagattactgagacattaaataacttgtaaaagtggtgatttagactctgatgacatatttttccccagtatggttccagatcatgtcctactttacaacatgttatgtacattgaccacattgatctaacgttccattggaatgaactaattaagaatattttccagtgttctatgggatacatataattcagttgttgaaacattaacattagcggagcgtgaaagtggttatagtggagggggagagtatcaatatgtttgacactgggaatcccagtaaatccaggttgtattctaactttgccgagaatggtgttggtctttttatacagataatgtgtttgtataagcctaaactatacaggtaaaaatgatactagatctcatgtgagtagttgtagttaaattaattaccatcatcagatacgtagtgtggagaaagaaacatctgtcttatcagatacacactttgatatcaaacaccataaagccctgtatactttgttctagttcagggtcataagatgctcagagcatttttagtaaccaagacaaagagcagaacacaattaattatatgacacaatgttttgaataccaacagaaacaattgcactggaacagcaaatcaattgctataaagcaagagagagatcttttgtggattttaataaaaagaattcactgtaatacagtgaaccaaagtccttaactatattccattcaacattatatttcttaagatgaaaaagattttttttgcttttcttgtgtaaagttcagtaaatgaattaataacagttcaagaaaaagcaaagcagtgtaggaaatacatatgtatatgtacacatacacttagagatacaatatatactatatgccatatatactacaccatttatactctatatatgtatatatatgtgtgtgtgtgtgtgtatatatatatatatatatatatatatgcttgtgtgtgtgtatttgagagagagggactacagtcactttattttggtcttcctgttacccgtttcatttacccaacccagggctaaatgcattgcctaattaactgtttaaaatgtcactggactgcatcttgcctaattttcagtgcaagttatgttttctcactttgatttttttttttttttgaccactctaccattttcctatgccaatcctgcttctagaaaagctaagaatattaattttctctaaggtaaagctcagtccaagagcaaacacatttcaaataagcatctttgtcaggtgtcttgctccagctggatttaattaaccccatcccgactgggtttccaggtgaattactcagcaacctgatttagaacagaggcagacatgcattcaaatgtcacgttaagcagcgttaacacattgtttctcgtatgacagaagaaaatgtttccacagcctcaatacagttagatgagaagggatagagacattctgtctgtgttttaagtcaatgctcatttatgcagccacatgcttaacactaagggcccgaaaatattgattttgctgttcatgtacacatttgcagatgaataaaaatatcaaggatcaggttatgtggtccttgttggctctctaacgtttttcccttcaagtggaagacttcaatcctgcaagcatgttcccactctatatttgttaatattctatttaatgatttctgaatacatttgtaggtaatacagtaaacatacccaaattgccctgttttatctgtccctgacccactctttctctgtcaaaatatcctcatttatatactctctcctgtcatattggatgaatcatcagtaactctctttatgtattacatggttacttttcaagaggttcttcacagttgtttaatgttctttcatgaatcatctcccccttctttttgtatttggcagatgttcatattctttatctaaagaaaaaaatggttgaactctctgttccatagcgattgtcgttggcacaattaggaatgtcatgaggtgccctcatttcaataattgagtggttcaactatacagaacaaagacatgtagttaatatagagcataaggattgactaagtgtcatggcagttaaaagttgtgtgataaaacgcaaagtccactacaatacccttcaaaggaagccagatttctactttttgtgttaaaacccaatgataattgcttagaaatatgtacaaaagatgcagataaaattacaataactataaagttacaattgtcttcctaaatccttattttagtgtattaccacagcaaattagaagcaaatgaacactagaatcaggagcaaagggaaaacagaaacacaatgtgtcttcatgaccccaatcttaacttaccttatttcaattcttagatgcagtcactgtcagctacttgtactttggttcctgctggttataataatatgtgtgataatgtttctacttgttgacaaactaatttctaacagtataggtatttactccatagtatgaaaaccagccatattatgtttcatccccaggtatttcctaattttattacttataatcattttatagttgtaatttttgcttttattacattaaatggtatgagtatacctcattttaaatttttaccaagtttagaaaggaacttttgaccaatatgaaaaacgagaaaatcatcacacattcttactctcgcctcttctccacctcccatttcggattacattctgtttgcatcagtagtatttgtaacatttatatcagttctgtaaagataggtgtttttggcttgagtctgtaaattgaaaatacatcactcttcttatataaatgtaattaacattacagcaaaataatagaaacgaatgtttttaaacaattattattttgtagacaccgttctaggtaaaatattcaatcaagttccatgacgtagatgctgtcattttacccatctcacaaatagataaattgagtcatagagaggttacgtaatttacctaaaactgtttggctaacatgtggtagagctaggatttaaatttacactatcctaatcatggtgttgatttaattaaaaatctggtgatccttggttgcaagtcaataaattatggtccaggttaacattaaatgctgtgtgggtttccttcatagttggttagttttacaatttttatgcatttgaaagtcatagatatttaaaatgttaattaattttaatagtataaaagaattcaattcatttttaatgctagacgtgacctcaaaggccttttggttcaatgctttttgaatgagaatgccaaagctcaaataaattatatgacttagataagatatccacacactcagttggttagttagtggccaaggaaatggggaaggtaagacaagggaatacagcacgaatgcataagcaatgctcttttttctcatcatactcaatttaaccttgtatactatgccatagatgagaaaactagtttctcatatgttcccacctatgtcctttttttactcccattgcctacagaaaaaaatgaagataaggcagagtgcgcatagtgaacttaaaagtcccctaaatattctacaatttttaaatttttttatatatttttcataacaaaggcattatccaatttgtaaataagctagtttccataagcttgttagctgttaggggtattggaaaatatggagggattcgatttcctaataattgtaaaaattctggtgtattaactagagtagaagcaattaagaagaaaccaataaacctatacctttatttatgtatttttttgagacggagtctcgctctgttgcacaggctagagcgcagtgggccaaccttggctcactgcaacctccacttcccaggttcaagcgattctactgcctcagcctcctgagtagctgggactataggcacgagccaccatgccctgctaatttttgtatttttagtagtgtcggggttttaccatgttgtccaggctggtctcgaaatcctggcctcaggtgattgacccgtctcggcctcccaaagtgctgggagtataggcgggagccactgcgcctggccaattttgaattacagttttagaaaaataacagctaaactacctttgtaactttttttttgtttttttcgttattttgtttttttgtttttgcatagcatgagctcttaaacaggagtccattaatagattcaaatattctaaaactgtatgtagactctgttcacagatatggagagtttttttgtaggagtagaagtttcatagctctcaacagattctcaaaggtgtctgtgattcagaataggtgaagaaccacttgactaatgacttccagtgctgttgggataaattataatacgttaacagccaacaccttatgcaaactcagccagtttctttcttttaaacctatctcccaccacttgatacttagaatcttccaatggagccaggcctgtgaggtcttgattatctgagcatgttttgcttttttccttccctaagaactttaattctctaacgctcacacaacttagaattctattatcaatacattttttttaatgcaagtcgaaacgtctatttaatctgtctttcagcctcagaaaactttcttgaccgcttcagattttacaaaacattttcttattgtctgtgttttttcacatttagagtttaattaattcatatggcttcttcatttttcttgctcattaaatttaaaatccttataagacaagaactgcctcttacactcctttgcattttctctattatcaagtaacatggtatgtaagtttcatgtgctcatccattctctcgtgtagttgataaatatttgttgagcctttattttgtgtcaggctaggtttccagcagtgaacaaaataggcaataaaagattgtacattctagtggaagagaaagatacacagagaaatttaattaaattatataatacgttaaatagtaagtgttaatgagaatagtataaagcagataaggagaaagaaaataagtatatgtgagtttgatttgaggcatgcagttttctttcatttatctatttaggagactggttcttcctcagtcacccaggctggagtgcagtggtacaatcatggctcactatagccacccaggctcaagtgattctccaacctcagcctcctgagtagctgggaccacaggggcatgccagcacacttggctattttttttttttttttttaataagttgtagagaccaggtctcactatgtggttcaggttggtctctaactcctggcctcaagcaaatccttcagcctcagcctcccaaagtgcttggtttacaggtgtgagccaaggtgcctggccagcatgcaattttagatagggcttgggcagggaagaacttatcagtgatgtgattttcgagtaaagacccaatggaagtaaaggagtgagccatgtttatgtcttcgaaaagcgaattccaaatccaagtgcaggaaactatggatcctgtttatggaatatgaggaaagagacaagaaataaaatcagagagttaatagggacctggaccctgttggacttcgtagatcacatgaaatacgtaatttgtacttcccctaaagcagagatttgagaagacggatatgatgaaacatgttaacagatcactctggcaactctgctatgcactaattaacgcaggcaagagtgagagaagagttatgaggctattgtgataattcatgcaagataaaatggattttggactagagtgatggcagtgaggatagtcagaagcagtcaaattctgaatacattttgaattaaatgttgtgtgagagtaaaatagtcattaaggatgactccaagggtttttatctgagcaactgcaattttaaacacattgttcattattgaggaagggagaacagcaagaaaagtaggtaggtttgggggagtatgatgaggataaacatcagaagctcagttcaggacacttgaagcttgtgattactaaatggagataatgagtgtttagaagaatctataatttgaagtttagggaagaggtctgggttagacatataaaactgggcattaccagtaaatggctggtattgaaatccacgagactggatgagatagataaatttttgttgcttggataagctagcgtagattatttgtcatcttcaggattttcttttttccccacatctttattgctgtataattgacaaataaacgttgtatgtatttaaggtatacatcctcagcattcttttttgatacagggtctcactctgttgcccaggctagagtacagtggcacgattatggttcactgaaccctcaacctccctgggctcaggtgatcctcccacctcagccttctgagtagttggaactgtaggcatgtgacaccacacccagctagtttttctttctttctttctttctttctttttttttttttttttttttttttttggtagaaacaaggtttcaccaaattgtctaggctggtcttgaacttctgggctcaaaggatctgcccacctccgtctcccaaattgttgagattacaggcatgagccaccacacccaatgagatcttccattaaaattattacttgtttaaatagaaatattttaaagggtaaatgaattacactcaagacttaaggactatgggcattggttgtcaatgaaaattaagcatggaagtaaatctcatggaacattctagattgatttatatttgtctttgtgtatgtgtgtatgtgtatgtgttttaggccagacctatttgactggaatagtgtggtttgccagcagtcagccacacaacgactggaacatgcattcaacatcgccagatatcaattaggcatagagaaactactcgatcctgaaggttggtaaatttctggactaccactgcttttagtatggtagagtttaatgttttcatctgagacttgtcatttctacacaaaatacaaaactacatatcttaagttttccaatactgtagatatatttaaaatgttcagccttcttgcactatattatgaattgtcttatttaattctagttctcaaaataccagtatctaaaattgcagtgaagacttttaggaaaaaagcctttaaaatgtgtatgccctatggatggagcatactgcatttggagtgcattgactccaaataattataaaaagttaatgttttgcttatgctaccaagagatttgatagagtaatcagctataattaattagctactcttgccaatttcattcatatactctataaaaggcaacatggtttactatttaaatcaggaaatctattcctgccactacttctgttgtaatttttcactctggggagatcctctgttggatggttactcattttctgcttctttagttgataggcagaagtgtatttatatttttattacattacacttcaataactttgactcttatctctggtgctacatagtcataccttccagacgtagagattacagagataataacactgtgacctctactcttcttctagcctatgaagtacactttttgccatgccaattttgaaatggtagcctctgttctcaattctcaaggctttactacactctaaaatcaggagttggaaaagtgaaatcggtgggattgaagatgatatttgggtagaagctgttctacaatagaagctgataattaaatgcttttgggaatattaaatcgatttcatcaattccaaaacaggagatctttcaatatggatggtaggtcccatcaagaaaactcaaaaatgacccagaagacagccttttgccagtgaatttattatcaaccagaatctagtactcagttttgcagacgcagaagcctgattgcctcagatcatctagcagatccacattggggtgggaggagttaactttaagtttaaaaagtgatatataaataaaaatggaaattcagtaatcttaaatgagatataacaagcagcagaatattcacatacaattgacaaatatattgctcttgataagcacatgtacttgggaaagcaaattacaacaaaaatgttagtttgtgaagttgggatcagattaagttgacttgaaatgtttcttctcctttggataatgcatggctgaacactgaatactgtaacccctttttattgcttctatacacgatagtatccctcctacccctgtttttagctctaagggagaaactattaatcctacgtccttagtttgcagtataggggaggattactttactattgactcgtagtacacatttgtatgttttctcttagttcagtgaggtagaaagggcagacataatgaaaatacggacttcaacctctgaggataaagagctatactgtatgaatttgaaagataaggctgttaatatgtttgttttttattgaatcacatatggtcagttcccattattggggtgtatgctctagttattcttgtgtgtgtcctatcctttcataaaacagtaagagaagatttaaaaatagatatttttcttattaagtgacaaaatggcttttgacctctagtgctcctttgaacttacagaataggagtgcctaaatgggcatccacatcataatcagaaaataggtaaatatatacacctatgtatatatccacaaaaaatttaaatgaataaaaacaattttaaaaagtaggttgacgagcctgtaatcagaaaaaggcaggtacatgaatagtgtattttatagctaaaagagcctggtatacctaactccatatgctctcctaagtgggaagtatatgtagaaaggtacattgtatatcctataagatcaccattttactgtctcaaacttcaacaatttaaaatcaacaaaatgtaatatgaaatacaggctgattaatgaagatccagccactgcttatggtctcgttttcccaataaaatctcatatctgtaaagcctttctatatatagactcttccaattgaaagagcatcttatcgcttaaacaggtttcctgtttatttgcgtagaggtgtttgtagtattctctgatggtagtttgtatttctgtgggatcagtggtgatatcccctttatcattttttattgtgtctatttgattcttctctatttttctttattagtctatctagcagtctattttgttaatctcttcaaaaaaaaacacctcctggatttgttgatgtttttttttttttttttttttttttttaaatgtttccgtctccttcagttctgctctgatcttagttatttcttgtcttctgctagcttttgatttgcttgctctggcttctctagttctttcagttgtgatgttagggtgttgattttagatctttcccgctttctcctgtgggcatttagtgctgtaaatttccctctcaacactgctttagctgtgtcccagagattctggcacattgtatctttgttctcattggtttcaaagaacttctttatttctgtcagaattctgttatttacccagtagttattcagaagcagattgttagtttccatgtagttgtatggttttgagtgagtttcttaatcctgagttctaatttgtttgcactgtggtctgagaggttggttgttatgattttcattcttttgcatttgctgaggagtgttttacttctaattatgtgatcaattttagaataagtatgatgtggtgctgagaagaatgtatattctgttgatttggggtggagagttctgtagatgtctgtgaggtccacttggtccagagctgagttcaagtactgaacatccttgttaattttctgtctcgttgatctaatgttggcagtggggtgttaaagtctcccactattattgtttgggagtctgtctctatgtaggtctctaagaacttgctttatgaatctgggtgctcctgtattgggtgcatatatatttaggatagttaggacttcttattgcattgatccctttaccattatgtaatgcccttctttgtctttttttgttttttttaaatctttgttagtttaaagtctattttatcagagaatagaattgcaacccctgcttttattttttttgctttccatttgcttggtaaatattcctctatccttttattttgagcctatgtgtgtctttgcacgtgagattgctctcctgactacagcacaccatttggtcttgactcttcatccaatttgccagtctgtgtcttttaattggggcatttagcccatttacatttaaggttaatattgttatgtgtaaatttgatcctgtcattatgatgctagctggttattttgcttgttagttgatgcagtttcttcatggtgtcgatggtgtttacaatttggtatgcttctgcagtggctggtactggtttgtccttgccatatttagtgcttcctgaaggagctcttgtaagacaggcctggtggtgacaaaatctctcagcatttgctcgtctttaaagcattctatttctccttcgcttatgaagcttagtttgactggctatgaaattctgagttaaaaattattttaagaatgttgaatattggcccctactctcttctggcttgtagggtttctgcagaaagatctgctgttagtctgatgggcttccctttgtgggtaagccgacctttctctttgactgtcctgaacattttttccttcatttcaaccttggtgaatctgacaattatgtgtcttggggttgctctttttgaggagtatttttgtggatgttctctgtatttcctaaatttgaatggtgggctgtcttgctagtttgggaaagttcgccgggataatatcctgaagaatgttttcccaggtatactaatcaaacttaggttttgtcttttcacatagtcccatatttcgtggaggctttgttcattccttttcattcttttttctctaatcttgtcttcacactttatttcattaagttgatcttcaatctctgatatcttttcttctgctggatcgattgagctattgatacttgtgtatgcttcatgaagttgttgtgctgtgtttttcagttccatcaggtcatttattgttttgcctaaactggttattgtagttagcaactcctctaaccttttttcaaggttcttagcttccttccattgggttagaacatgctcctttagcttggaggagtttattacccaccttctgaagcctacttatgtcaattcgtcatactcattctccatccagttttgttctcttgtttggtgaggagttgtgatcctttggaggagaagaggtgttctgggttttggaattttcaccctttttgtgctggtttttcctcatctttgtggatttatctacctttgatctttgacattggtgaccttcagatggggtttctgagtggatgtcctttttgttgatgctattcctttctgttttagttttccttcaaacaggcccctctgctgcaggtttgctggagtttactggaggtccactctagaccctatttgcctgggtatcaccagcagagactgcagaacagcaaagattgctgcctgttccatcctctggaagcttcgtcccagaggggcacccaccagttgccagccagagctctcctgtatgatgtgtctgtcgacccctgctgggaggcatctcctaggcaggaggcacgggggtcagggccccacttgagaaggcaatctgtcccttagcagagctccagtgctgtgctgggagatctgctgctctcttcagagccggcaggcaagaacgtttagtctgctgatgctgcacccacagctgccccttccctcacgtgctctgtctcagggagatgggagttttatctgtaagccgctgactggggctgctgcctttctttcagagatgccctgcccagagaggaagaatctagagaggcagtctggctacagtggctttgctgagctacagtgggctctgcccagtttgaacttcccagcgactttgtttacactgtgagggaaaaccgcctactcaagcctcagtaatggcggacgcccctccctccaccaagctggagcctcaggtccacttcagactgctgtgctggcagcgagaattacaagccagtggatctcagcttgctgggctccgtgggcgttggatctgctgaacttgaccacttggctccctggtttcagccccctttccaggggagtgaacggttctgtctcgctggcgttccaggcaccactgggtattagactcccacacaataatagtgggagacttgaacacaccccactgtcaatattagacagatcaacgagacagaaaattaaaaaggatattcagtacttgagctcagctctggaccaagcagacctaatagacatctacagaactctccaccccaaatcaacagaatatacattcttctcagcaccacattgcacttattctaaaattgacgacataattggaagtaaaatactcctcagcaaatgcaaaagaatgaaaatcataacagcctctcagatcacagtgcaatctaattagaatgcgggattaagaaactcaaaagtgcacaactacatggaagctgaacaaacctgctcctgggtgactactgggtaaataatgaaattaaggcagaaataaataagttctttgaaaccaatgagaacaaacacacaatgtagcagaatctgtgggacacagctaaagaagtgtttagaagagggaaatttatagcactaaatgcccacaggagaaagtgggaaagatctataatcgacatcctaacatcacaattaaatgaactagagcagcaagagcaaacaaattcaaaagctatcagaagacaaataactaagagcagaactgaaggagatagagacacgaaaaacccttaaaaaaaaaaaactcaattcaggagctgtttttttgaaaagattaacaaaatagatggctagccagactaaaaaagaagaaaagagagaagaatcaaatagacacagtaaaaaatgataaaggggatatcaccactgatcccacagaaatacaaactaccatcagagaatactataaacatctccacgcaaataaactagaaaatctagaagaaatggaaaaattcctgtacatatacactcttccaagattaaaccaggaagaagtcaaatccctgaatagaacaataacaagttctgaaattgaggcagtaattaatagcctacaaaccaaaaaaagcccaggaccagacagattcacagccgaattctaccagaggtacaaagaggagctagtaccattccttctgaaactattccaaacaatagaaaaataaggactcctccctaactcattttatgaggccaacatcatcctgataccaaaacctggcagagacacaataaaaaaaatttcaggtcaatatccctgatgaacatcaatgtgaaaggctcaataaaatactggcaaaccgaatccagcagcacatcaaaaaggttatccaccatgatcaagttggcttcatccctgggatgcaagattagtttaacatacagaaaccaacaaacgtaatccatcacataaacagaaccaatgacaaaaaccacatgattatctcaatagatgcagaaaaggcctttgataaaattcactacccttcatgctaaaaattttcaataaactaggtattgatggaatgtgtctcaaaataagagctatttatgacatacccacagccaatatcatactgaatgggcaaaagctggaagcactccctttaaaaactggcacaagacaaaaattccctctctcatcactcctattcaacatagtattggaagttctggccagcacaatcaggcaggagaaagaaagggtattcaaattctctgtttgcagatgacatgattgtatatttagaaaaccccatcatctcagccgaaaatctccttaagctgataggcagtgtcaacaaagtctcaggatacaaaatcgatgtggaaaaataacaagcattcctatacaccgataataaacagccaaatcatgagtgaactcccatttacaattgctacaaggagaatagaattcctagcaatccaacttataagggatgtgaaggacctcttcaaggagaactacaaaccactgctcaaggaagtaagagaggacgcaaacaaatgaaaaaacattccatgcttatggataggaagaatcaatatcatgaaaatggccatactgcccgaagtaatttatagattcaatgttacctcattaagctacaattcactttcttcacagaattagaaaaaaactactttaaatttcatgtggaactaaaaaagagcctgcattgccaaaaccatcctaagcaaaaataacaaagctggaggcatcatgctaccttacttgaaactacactacaaggctacagtaaccaaaacagcatgatactggtaccagaacagatacatagacgaatggaacagaacagaggcctcagaaataacaccacacatctacaaccatctgatctttgacaaacctgccaaaaacaagcaatggggaaagcattccctatttaataaatgatgatgggaaaactggctagccatatgcagaagactgaaactggaccccttccttaccccttatacaaaaattaactcaagatggattaaagacttaaatgtaatacctaaaaccataaaaaccctagaagaaaacctaggcaatacctttcaggacataggcatgggcaaagacttcatgactgaaacaccaaaagcaatggcaagaaaagccaaaattgacaaatgagatcttactaaatagctcctgcacagcaaaagaaaactatcatcagagtgaacaggcagcctataggatgggagaaaatttttgcaatctatctatctgacaaagggctaatatccagaatctacaagaaacaaatttacaggaaaataaccccatcaaaaagtaggcaaagggtatgaacagacccttctcaaagaagacatttatgtggccaacaagtatgtgaaaaaaaagttcatcatcactggtcattagagaaatgaaaatcaaaaccacaatgagataccatctcatgctagttagaatggtgatcatcaaaaagtcaggaaacaacagatgctggagagaatatggagaaataggaatgattttacactgttgggagtgtaaattagttcaaacattgtggaagacagtgtggtgattgctcaaggatctagagccagaaataccatttgaccaagcaatcccatcactgggtatatacccaaaggattataaattattctgtgcttatttcagcactattcacaatagcaaagacttgaaaccaacccaaatgcccatcaatgatagactggataaagaaaatttggcacatatacaccatggaatactatgcagcaacaaaaaaggatgagtttcatgtcctttgcagggatgtggatgaagctggaaaacatcattctcagcaaactaacataggaacagaaaatcaaactcggcatgttctcactcataaatcggagttgaacaaccagaagacatggatgcagtggagcatcacacactggggccttttggggtgtgtggggctaggggagtgatagcattaggggaaatacctaacatagatgacggattggtacagcaaaccaccatggcatgtgtatacctatgtaacaaacctgcacgttctgcacatgtatcccaaaacttaaagtataataataaaaagtttcttaaagtttacttatggctgcaaataagatgaggattcagcataagtcatatatttttaaaatatgtcaattcttgccattgtgttagggaaaccaccaagtacacatttatacatttttgctcagcatttttcaggagataatctcaatgatgattcaaagaaaaaaataataactcataagaatttttatttactgactgcttagtcacaaaagacagaacaccatctcttgaagtctcagacttagaacactctcttcgatagatttaccagcaaaattcgtgattcatgcctgtatagtaattgcttttgtgatgttcatatttttatttaaccagatattggttctgtagcttatgcatgatgttggctactctccaaagaaatttcattttaaattagttatgccccttaggagaataatgaaacatttggggagaattttattattgggggattgaagctatatttggtttaagaaatacctgccaaataatgctttgacaattttaaacataagctttgttgatagaattgctttataaaattaggaagtcattgaaaccttgtaggatttcatatatagaatttgatatgctttggccttaactggtgttttgaggcctgaggtttagttttaagtggaattgccttttaaaatgagtagcagtaggcattagcataagcgatttcaggagctgtttctagtgtgtttagatgctaacatatgcaaaaataagtacatctagggtaaacttaataaattatgtatgtttatgctcatagataataggtatatctctttaaaaatatccttttgtgaatcagacaattctcttcccgttatgatttctctgtaagacagtacattctacatgcgttggtcgtgggtttcatatacattgtttctctgagtttcaaacagattggtttgtttgccagtccaaaaaaaaaaaaaaaatcctccctatattaagagagtgctttgtcagctttcccctgtgaataacaaagtgaggatgttctctttaaaggaataaaacaaaaaatcagggataaaagattgcgcctgttctagatgtcttttgaatattagtgtagaaagccatttccatttaggatatgaaatatgatatggaaatgttcttacttatttaccagggtaactttagaacaaaaatgaataatgacagtcaaatttgaccaaaaaaggaaggacactaggactcgagagaaatttttgtatcctcaaaatgacatttacaaacccgttagggtttggttttaatcccctttattttgacttcctgagaatggtgacacggattctattttctgcttggctaatccctgcatcactcttgagttgtttttatagccttcttttccaagaattagctctgcctgttggaaagttttactcctggagtgaatgctttcagacttggctttgtatgcatgcaggattttaacctacaaaaataatcatggaaagatacatagaatttgctataaaagagaagaatatttttaaggcctcttatgttgggtttgatatcaattggctgaacaagggctgttttaacttttttccgcctctgctgtaatcatcacattttgataccataatggcaagaaatgtttataagtttacacaggttaaaattgagagggttaattctcaggaggattagagttaatttaaataaataaatatttttgtgaacataaacactaattttatatcatttagattgatttttgtctagaactcattatagagtaccttgttttcagaaaatctaatgcgattgcaatattataggtgttccttctctatatacggtatttcaactagaaatccttactgtaaatatttcagacaatttagagtcaaactctgcagttgaaaatatatttaagaaaatatttaagaaaatatttcactggcacttacatgaatgaaaaatggccattgcctttttgatgacaaagtaatatataccaaataggtatgatacagatgattatattaacattcagatattattgtagcaatttcctcttccctgatgggaaatcttgaaattgctcttcatgacaaaaattaagacgtaaatgttatttcccagtggcctaaaagttagaagaggcatgagagtattccagtgtgttctcttgatgttatgtgttgtacatctttctcagttcagataccataaaaaaactgagtattttctgggcagttggaaccagtcactaataaatgaaagcaatttttgttctccttatccatttcagttgtttggatgacaaataattgcatgtaactgtcccaaattcacctacttagacaacagagacttgaaaaacattaaatatgatatttgtgtgtgcgggagcctggcttgaatttaccctttataacaaattttggtattttctactaatctttcacattcttctatgatttgtcaccattttaactttatggaaaatggtcaatttataatttctatctcccctaggggctgatttgttaaagtatgctttagttaagtaagagtttcttactcagttggggaatttaaataatgaagtataatcatgcgattgaagatgtgcattatggattaggttctatgccaaatttgttcagaaacatttaaatataattcttacctagataactgagaatctcttttcaattagcttaccaggattattttcacaactttttttttttaattacaggtgaaataacaatatccttggcctatacagtgacattaagtgatttttgaatgattgacaagacattaataaattaataatgagaaatgcagccatgaggttctaatgctaaataatatgtaatagacactttgtggatggttttcctagtcatatcatcacaatgagttcatgagactaaagaaatatattaaaaacatctattggtatttgttaattttatttcagctatgaaggaatacatgagatattaggtttgattcagaaaagtgttctatagttgatatctgtgtttcttgtcacagaattttgccttggcaaaaacattttgaccattctaatgatggtaaatgagaataaaatggcataagtagtttaaaattttctatgtggttttaagtcagtgataatatttgaatgtaatgtatattttgctgatagttggaaaacttacttcactgtcttcaaaatggagttaactgtgttttatacataattataagtgatatcacagggctgggtgtgatggctgacacctgtaatcccagcacattgggaggccaaggcaggagaattgctttaggccaggagttcaaggctgcggtgagctatgattgtgccactactctcaagcctaggcaaaagaactgaggccctgtccccccatcccacaaaaacaaacaaaaaaagacatcacagaacctgcaaatgaatatccaaaaaccttaaagctgggcactggaaaaatagatattaggttggtacatatgttttccaattaaataatttctatatataaaatgcatgtgacattttacagctggaacatgaaatataagatgaaaatatactattttacaacaatatttgggtaaaataatgatgaactaaagtctttgttgatgtcatttaaatcttataagagggaaatttaattgtcatacaataggatttattccttgcagagggaaacctgaagatttatagttgtcttgtcattttattttaaagcaataagctatcctcttagatttattctctttttagaacttttatttttattgatgcataacgttttacatatatgtacatacatgtgatattttgttaaacgcactgaatgtgtaatggtcaagtcagtgtatttggggtattcattactttgagtatttatcatttttatgttctgtgaacattttgagttctctcatctactttgaaatgtacatcatattgttgctaactctagtcacccctttctgctgttgaacattagaatatataccttccaactatatatttgtacccattaaataacccctttttatattcccttcctacccttcctagcctctggtatcttattatactctctatttccatgagaacaactttttttacacctatatatgagtaagaaaatgtaaaatctatttatctttgcctcgattgtctcacttaataacctgcagtttcattcatgttggtgcagaaaatgtaattcttttttatggatgaagagtattccactgtatatatgtaccacattttctttatccatttgttcactaatggacacttaagttgctattataaatagtgcctcaataagcatgcaagtacaggtatgccatgcatatacttttcctgatagttagaaaagtatatgattgctttccctttacatatatacttattagtggcattgctgacacatactctatttctatgtttagttttttgagaaatcttctccatactgttttcaatagtggctatactgacttatattctgaactacaacaatgtattaagagttcccttttcgttgcacctcgtcaacatctgttgttttcttgtctttttaataatagccattctaactggggcaagatgatggctcatcatgacttgatttgcatttccctaatgattagtgatgttgagcattttttcatatacccgttggtcatttgtcttcttttgagaaatacttattattgtcctttgtccatttttaatgtgattatttttttactgttaaattgtttgggatcctcgtatttcctagatattagtctcttgtctgaatagtttacaaatcttttctcccattcagcaggttgtctcttcactctgttgaatccttcctttgttttacagaagctctttcattttctacagtcccaattatctatttatgtttttgttgcctgcgcttttgaggtcataaccataaaatctttgcctagaccaaggtcctgtctgttttccctatgtttgcttcatgtagtttcagttttaggtcttacctttaaatccttaatccatcttgagctgaattttctaatatggtgagagacagggatccagtttcatacttctgcatctgacaatccaattctcagcaccatttgaagaaggtgtccttccccctaatgcatgttcttggtgcttttgtcaaaaacaagttgtatgtaaatacatggatttaattctgagttctctaatctattccattgttctatatgtctgtttttattctaacaccttgctgttttgtcaagtagtgtgattcataagtctttgttctttttgctcaggattgctttggctattcaggctctctgctggtctttgatcgtacaaattttatgatcactttttattccatttctgtattctgatagggactgcattattcaatgtagaatgctttgagtagaaagatcatgttaataacattaattcttctgaccgataaacatgggatgactttccatttgttggtgtactcttcaatttgttttgtcagtgttctgtattttatacggacctttccctcctgggctaaacttactcctaggtattatttccagccgttgtaaataggtttgccttcttgatttctttctcagccagttcattattggtatatagaaatgctactgaattgtgtatgttgatttttgtatcctgcaactttactaaatttatttatcagatctgagagctttctggtgagggtttagctttttctagctataagttattaacaaagagcagtacttggacaacgatttcttctattaggacgccttgtatttctttctcttgattgctctggctaggacctccagtactatgttgaatgagtggtgaaagtgggcatccttgtcttgttcttttttttgtttttggttttttgtttttgagatggagtcttgctctgttgcccaggctggagtacagtggcccaatcttggctcattgcaagctcagcctccagggttcatgccgttctcttgcctcagcctcccgagcagctgggaccacaggcatctgccaccatgcccggctaattttttgtatttttagtagagatggggtttcaccgtgttagccaggatgatctcgatctcctgatctattgatccacccacctctgcctcccaaagtgctgggattacaggcgtgagccaccacgcctgaccattccagttttatagggagaaatttttcagcttttccccattcagtttgatactacttgtagatttgtcatatatggtctttattttgttaattttttttgtatgcctagtttgttggagtttttatctcgaagggatgttaaattttatgaaatgttcttttgtgtctattgaaaggatcatgttttctgtttttcattctgtttgatgtaatatgtcatatttattgatttgtgtatgatgtatccttgtatcattgggataaattccacttgataatattacattttttatgttctattggattgctagcattttgtagagaatttctacatcagtgttcatcagggatgttgtcctgtattttttgttgcataattgtctgggtttggcatcagggtaatgctggcttcatagaatgagatagggggaattccttcctcttcaatttttcttggaacacttacaggagaattggtaaagtttggtagaattcagcagtaaagacatctggtcctggactgtcttcgttgggaaattttttaagattactgattcaagatcattactaattatagatctgttcagattttctatttcttcttgatccacggttggttgtatgtgtccgggaatttatacattcctctagatttttagtttattatttaatagttgttcagtatagtctctgaactttttatttctatggtatcagttgtaatgtctccgtcttcatttatgattttgagtcttttttttttcttggttagtctagcaagtgctttattttcatctttttaaaaatcaaacttctcatttcattgatactttgtattttttgctctctattttcttgagttttgctcaatttttaggattttcatccttctactaattctgggtttggtttgtttttttttctttgactagctccttgaagtactttgttagattgtttgaaatatttcaacatttttgatgtgagcatttttgctatatacatcccccttagcactgcttttgccatatcccgtaggtgttattatattttgatattcatttgtttcaataattttttgaaaacatttcctcaattttcttccttgacccaatggtcattcaggagtatgttgttcaatttccatgtttttgtacaggttccaaagtttctctttttgttatttccttgtgttttaagaagatattagatatgattttgattttttataaatttgttaagacatattctgtcataacatatggtctgtcctggagaatgttctgtgtgcttatgagaaaaaaatgtgtatgactgttgaaggaattgtcctataagtgtctgttaggactatttggtctaaggagcagtttcaagccaatgtttctttgttaattttttgtctaagtgatctaatgctgagagtggggtgttgaagtcctcagatattactgtatttgcatctagctctccctttagatctaatacttgctttatatatctgggagctctcgtgttgggtgtatgtatgtttagaatttttatatactcttgctaaacttatccctttatcattatataatgaccttattgtttgtttttactgtttttgactgaaagtctgttttatgtaagcatagctgctgcttctcccctttggcttcggtttgcataaaatatacttttccatccctttacttcaaatctatatgtgtctttacaggtgaaatgagtttattttaggcagaatatttttgggttatatattttttaatccattcagccagtttatgtcttttatgtggaatgtttaatcaatttacattcaacattattactgatatgtgagggcttatttctttcattttattgatttatggttgttttgaatattttttcttcatttttttccctcattatcattatagtgtgatggtattctttagtggtaacatttgagtaacttttcttgattttttttgtgtgtttgcactactagttgtttttatatttttatgtgttttcatgatggtagttgtcattctttcacttccaggtataggactcccttaaacctttcttgtaaggccagtatcatggtgataaatttccacagctttcactcgtctaggaactattttatttctccttgatttatgaaggctaccttggctgggtagagtatccttggctggtggttgttttctttcagcaagtttaatataacatctcattcttctctggcctgtaaggtttcttctgagaaattcactgttaatctgatggaggtttctttataagtgacaaggtgcttttctcttgctgtttttagaattctctttttgtctttggcttttgagagtttggctataatgtgtcatggacaagacatttttgaattgtatccctttttgagatctttcagcatcctgtatctggatgtctaaatctcttgctagacttgggaagatttcatctattattttgttaaatagggtttctaaacctttagtttctcctttaccttctaggacataaaaaatgcaagcatttcatggctttatggtgttgtatatgtcacataggctttgctcatttttttaaaattttttgttattttttgtttgagtaggttattttaaaagacctgttttcatgttctgagattcttctgttttatctagtctcctcttgagtctttgcctttgattctgaatgtatatagtagtatacttcctgtatgatttctttggatgtaaacagtatgaatggtgtctgtaacttcctcagtagcttagggtgcagttgttagcagaagctgtggtgaagttttgccggtgactgggacaccaagtggtccagtcttcaggccccagtggtggcatcagttggttgagcgtgcctgtcctcaggcctcagagctgtgtacattggcattgatgttagtgtgtccaggcaggctaaccctttggcttataggtggcttgcttggttgtcaggaaaagcataggtgggctgggtgggtacacaggttcccagcccaggggcagcaagcatggtgcgggtaatggcaatagtgggaggggggcaaccctctggaatgcaagcaatccatgatggtgttggtggtggatgcaacagattgggcaagccagttcctaggcctgcagatggtgcatgtaggttgacgccagctttggtggtagtggaagcttgagtgggcccaaattcaggccccaggaagactagtcagatgccaatggtggtaaactggggtgggagagccccaggtctctatacaaatttttatgtactgggggatttggaagagcagagctgggaagacctgtcctcaggactcctggtggtgcatgcaaccactggttattgtagtcgaggggcaaggtgctccccaggtcccttgtgcaatgctcaggtggaaggcagtgttggctacactgtggccctgctactggagagggtaaggttgctttccttgggagcagccataagcagttgcctgggtagcctgtgcgtcgcttgtgtctcaactccacagcagttcacagtgacagcatttgcaggcagtggaattagtcttcagtgtgcatgaagttgagtggccacccctctgttgggcaggggagggtttgctgccagtggttcctgccttggccccagcagttgcagccatgggtgggaaatatcactgagactccaggaatgtggagatagggaagatttttagtcctaggtcaggacatagactggtgggggctgggctctcaaaaccaggccatgttgcagctgcttaggactctagagtttgtggaacccagcatgggcttcttccgtgaagcaatgcctttgcacagtatctagacagctgtgtgttggtttgggggcccacacgggttgaagggctctcaattggctaggattgtaggaatcttgtacaagaatgtgtacctttgtgcatctctaattctctccccatgttagggagcctctccagactcctagccaatctcagctggatagagtgcctcatttccttctttttccttttagtggttttcattgcttctctgttgaatttcagtgttttctcttagttaatgtattcaaagtatgattatctacttggtactttggttcctctccatggaagaggtgagtaacagatccatcaattcagccattttgaagccccagattttttgtcttatggcaatcgtgtggagttagtggatcatatgatatccagttgaaaagtgagaaaactgttacaactattaaattattaggaattttatatattattacaatttaataaggtggttgaaaccagtgtttttacttttaggaaatatcctgtaatatcattcttgtgagatgttaatattgctgaataaacttttgcttcaaatcaaagcacatttttcccctgcaaagatttttctaatttatcatcagtgatataaactcaaatttgcaagttccttttggtagaagagtgcaaatgtttaagtagggcagtcatgttctagataatttccatactttatcttatgtcttgtacacaacaattccaggtaagtttatccttcttttataaatggaaaaactgaggcttagagagctttattaaaatcaagatcacacagccaatagataactgagctataatcaaatccagggtttatctcttcttaaagtccgtgttatttctcacaagactgtccaataaaatcggttggggaagctttatggcaacactgggattgaaactagtattttatttcactgaggacgggctgtgacatcagcaatttttagaagctcagtaagtgagagtatcctgcagctaagatagaaacaactacaatggaacaattgtttctgtgagatatgcccttttataggataagatccagaatctgttgtcccagcatttgtttagacttctagcattttcttccttaaaaaatgactaagcctgctgttcacatcttcaattactggagtactgcttattgctaacagttctgttaatgagaaattgttcatccacagacaaagtaaaaatagactagctgtcacataagactggccatcaaaacattctctttaggattaagaaacttgccttatctcctgtctgcacagttgtctctcttcattccttcttctatttattgcttcacggacatgtttgtgatagaatggtactctgactcaaacagtttccagcaagggttgcccaggtgagaggagctgtttgcagaggtgatccctgactctttgttctttaatttatttcttcttttgcctgcctctctcatcttgttactaattgacatcactgtgttctgctatctgaggtttgttgatgccttttgcagccaataaaaatgtctttcattggcagagctgataaagaactagaagaatttttaataataactaagggctaataagggaaaacaattaaaatgatggtaaaataatagttttcaaattagaagtctgatcccataaatccacttgaaataagcaaatggcttaattttatgatctctgatattaatgccataaataggttgaatttatttaccatttatccagggttagttttgctaaacagtttgtattttagccagatatgcaacttttactgacaggacataatgaactttggagcctgcactgttagtgtagttgtaaggagataaaattggcaattatactcacagatggaatagaatttaatctatgacatttacttagctgtacagaaggatacaaggcaggagatacactgtcatagaatctttgtatcattggatggcccagaagcaaccaacatacagatttccacatgcctctcacccaaatgtgctccatatagctgctaggacaacggccaaaatcagtgtggtttacttgacatgaagaaattgcagcattaatttcccaccaatatttaataccattgttgtcacataggacaaaagactatatattgcctctctgccccactccccagttaatttaatagtagtcctacctagcaaacaagagtgacaagaaattctactattatcttaactcttaatcctaagaaaataagtttctatgttcattttcctaggcagcatcagattaacctagggttgatttaactttttctacacagagccaactagttttgggttaaaatctgatttttgcctttattagttttaggccactggaaaattattgaggctcagtattgctcacgtgtaaagtaaaaatatttacctcccactgctacttcaaggagtaagtaaaacctgtatgtatttggcccgtaatatgagcccagaaacagtagctaaagttatgtcaaataactggaatgttgtaaaaattaaatggtccctttatactcctgtagggaaaactgatctttccagttattttgcctgcctctagaataaatgctgactctccccaaattaaatacaggagtcctcccttattcattacagtttctgctacccatggtcaaccgtggtccttaaattgatgagtacagtacaattagatgatggtggggagggtgggcagggagaggtgagagtccacattcacgtaacttttattactgcatattgctataattgttctattagttattaatctttttctgtgcctaatttataagttaaattttatcataggtatgtatatgtatgggaaaaacagtatatatagggcctatttgtggtttcagacatctgctgtaggtcttggaacatatcccccgtggaaaagggggatctactgtcatttcccatttgaaatcttgctggtcttcctgtgaccttcccactcattctggttttctggtctgaggaatactgctggctcacagctggtgtactgggtggtaatctttgatatccttgagctccagagtctaatctagttttcataaaagatttatactatatcttaaattcctcagagtggttctctctctctttctctctctctctctctctctctctcacacacacacacacacacacacacacacacacacttgacagagagattgattcacagttgtcatggatacatggtagatttctagcaagtctcctgaaggctggttcatgatagtaccttataattgtcatagtatttgtaagacattagttagcacacttgcaaaagtataactaggttttctcttgtagtcattacgtcatatgacatcgtaaaagtggttgaattggttcccagactctcagaaaaactcaacttctgaagctgggagtaatacatacatagtaatattgatgtaatctggtgtgatatttattaaacattaagtgctgggcacattgcttgatattgtataatttcgttttatttctgcaaaaactctaggaggtagagactattattttggtcatttgcaactgaagagtttatgtaaattgcccacatcactcagctagtgagttggagttaagattccctacttgtaactactacagaatataatcttatggcagaatattcctctcttcttccatgaatattttctttgcattaactaaaaggttactcattttattacagggctaattgggtttgtttttaattggatgcacatccatcagttgattccaaatgttttgaaaataaatggaaaagttttataaactagagccagaataagagggatactgaattctttttactatgatgtttccttgagagaatcattaaataattaaagtagaaggatgtttacaaatcttgcaagtatgacattctatccaagccacactaaagttatcaaagggagacactcaccagttatgaaaatattcccctctactctttctcagttaactctaaaattagatggcaaaggcatcaaaacatctcactatctcaaatatttcctcagtgaggtcgtgatgtgaacatctcttatctagattgaaatcccaccttgagtcatatgtggattaaaaaaaaaagctattatctgagaaagtctaaataaaaagatacattttacctaggctttaatatctaagtttttctgtatagaatcagttgggcaagtgagtctcttggaaaagtgatttgaaaactgtttttattaataattggaatacacacacacacacacacacacacacacacacacactcttattcctcctcaagaggcaagagtacatggtgaagcccttaataaattcacctcactgtagttaaacagcagactatgatattgttgtagttgttaatcaaagggactctgaaaagagacagccagaagtggggaaaaaactagtatagaaaaataacgattgggcatttgagtatttggaaaaaacctggtgaagtaactaggttttaaaagactgaagagaaagacaaatttcacccattgcaaaatataacaacgatataaaaatgagacataagctcctggataaaaataaataatgtatttttttctctctattatatctcgaattttgctttcaccaacaaactgcatgtgaaatacgaaaaaagttaaaaaatatggaatattaagggactataagatgagaaatttttaaattgttataacctaagtaaaactgctaaagctagttgtagcgagatctgtcttacataaattttccattaaatgataatatctttgcattcatcataaacagaaatgtacattttaagcaaaatcattataatagaaatgataatactccttacctagccttcttcacgttaatcttaacatagactagtgaagaacatagcaaaggtagtgcttgaaggaatgttcttattgaaagaaatctttcctcagattgatcaagaggcattgaataatcataataattcaaactttaatcttgcagatggaatgaaaatgtttaaaattagaattattgtcagagcttaaatattgttacttacacaagccaaatacattaatattatgagcactattgttttagctaatgtgtcttttactctgcagagtacatatagactagtctaaaaggttttttttttttaatgcttttatagagcacgagcatttgtgcaggtggctgagtagactaagattttttccaatgggttgatttgaccacatcattaataaagtagaaattctggagcccctactttttattcttagtctgacattgtaaattctttcagatgctacataagcattttaaagttatgtgccccaggcttactttgttcagtagaaatgcatgttaattcatcaaatgtctattgataactttacataaggaatagtgctatatactccaagtgtgtcaggaagtaaaagatatacagtctgccaaggtattgaaaattgcatataggccaacaaacaatatataggtaactgttatataagacagaatgtgaactaattcagagaatattttttaaagtacagagcatgtttttcattctaataaatgtacaaatatttatgtcaaatgaaaatgtggctgcatcataattcttatatgggattttaaatataccaaaatccacggatccatacagtagttcttactctgcttccctaattttattagttggacataaatgcataaatcgataagatgattttggagcgggaacctaactttttctatagttccttggaagttaattgatttcttaagtgataaagtccaccactattttgagtaaggtttagttaatgatttctgtttaacatgtgtgatttctaataaaaagttctggatttattttctcttgttgaaagttgttcattagaactgacacctgagctaacataagcaaaagtcattgtaagtccacacgtttgcacagatgggtgtccccccaccatccttaggtttgagcaatggatttttacaagtgaaactcagtgcaattaatcacctccaacatgagaaaatgctctttaaactattttaagtcaacatttacaagagaaattggcctataatacacctcgggttcttaacctttttgagagctatagaaacgctgcttctctataaaggtaacatatattgccaataaaatacataagggaggacatctacttataaaactcagaaaacgatttaataggaacagttgttttattagccttctgctctttaatggctgagatcatcctggggctatttaaaaatgatttaatttgtcctctaaacacacagatgagttccaggtgtgtatttcccccccccacccccgctccatgaatcaaccatgtctgcactgacattaatagcttggatcgggaaatctctgtaataataaatctatcttttaagttggtcatttaagcagctttaagtatgaaaaaagtgaagtattagaactatttcaatccatgatgccttatagattatactttaagaatacgactgtgcctcactatctgagaactggttctaggaactccagatactaaaatctgtggatgcttaagttccttatataaatgatgtcatatttgcatataacctatgcacatcctcctgtttacattaaattatctctagattacttataatacctaatacaatataaatagtacgtaaatagttgttacattttattctttgtgtttaatttctaggttcagggttacacatgcatttttgttatatagataaattatgtgttacaggggctctgagtacagattactttgtcacccaggtaataagcatagtacccaacagggagatttctatcctgttaatttttattgtatttcctgaatatttttttatttgggaaacaatttattttttttggaaatttttgtgggtacatactaggggtgtgtgtgtatatatatggtatatatgtgtatatatatgtgtgtatatatataccatatatgtgtatatatatgtgtgtatatatataccatatatgtgtacatatatgtgtgtatatatggtgtatatataccatatatgtgtatatacgtatatacacatatgtgtatatacgtatacacgtatatacacatatgtgtatatgtatacatatatggtatatatgtgtgtatatgccatatatctatatatatggtatatatatatacatatatgtatatacatatggtgtgtgtgtatatatacaccatatatgtatatgtgtgtgtatatatacaccatatatgtatatgtgtgtgtatatatataaacacaccatatatgtatatatacgtgtgtgtgtatatatacacacaccatataggtatatatatgtgtgtgtgtatgtgtgtgtgtatataatttttgtgggtacatggggtgtttgtgtatatatgatatatatgtgtatatgtatatatatacgtgtgtgtgtatatatatatggtacgtgagatgttttgatagaggcatacaatatggaataagcacgtcatgagaatagcatgtcacctcaagcatttatcctttgagttataaactaattacactcttgaagttattttcaaatgcacaattattgactatattcaccctattgtatcaaatcagaggttatttgaatttgcagatacagaacccgcagatacggagggcccactgtatatcactaaatcattcatacctctccacctgtacaaccaccaccatagttcaagttattctcatctttttctgtgactgcaggaagaacttgacaatgactggccctattttctttctggatttaacttaattctcttttacacacaatcatctagcatgatatttacatagtttaaggccttagcacttgctgttccaactccctgggatgttgttcttccactctgcatttcacagctgaaccccagaaagattatgtcctttgttgatttaacccttctcagaatagcatgtgtctctgttactgcatacatattgaaactattcttagttttttgttttgttttgtgcttatgttatcacatactatacacaccaagtctgtaggctgtttttttgatattctagtgatttttaatgataatatttaatacatatatgagaaaagaacctttttaatgttaagggagagcatgatctgtgaaattatctgtctttaatttatctttggaaatgaacatttttcaaagttttcattagattgtattcaaaattggtttttattctaaaaaattaccatgttactatttcatatttaaatgcaactaggattagacaagcaacaataataatttttttcttacctgggagcctacatgaatactgagtgtattaagatatcaactgagatatcttgctatcttagtttgaggagaataccatatatttggggaaatagagagaaagtggagtgaacatgtaatttatgtctcttaaaggtgactcaaatgttctttatctgtatcttaaaatctttagtgagcattcttccttatgtttaggctagttttctctctgagataggtaaagtaagctactttgccttagtatgcggatgtatgtgtgtgcacgtactcatgtgcccatcttgtcaatacatggagagatggaataagacgaatgtagtatgtctggggtagaaatttggttgcaggagagaggctgacacattcacaagcagcagcaagggaagagggattactggagtagaggcaagggagaatttatttacttaattacataatacttatttagaatctacagtgttcccggtatattgagttatatatgagaatgcaagaaaatgacatcactagtttaaagatacaatgtcttctgtttttcaaatgtttcgttgattttgttttattcaatactgtttagtacaatattaacagagtaaacaacagtatgagtccttctcatgtttcactttgattgtatcattgatatttaatccaacgtaaaattcctaaccttcaaaaaataattctcacttaatgttccagtggagtttgttcccaccatagtactgctggcctatcacaatgctgtaggtagttgtagacttgttcagtcctgttattggtggtgacttcctcatgtgctgggacctttattattcacagctgaattcccagagcataagagtgccttttttttttttttttttctttttttgagacagaggctcgctccgtcgcccaggctggagtgcagtggcgcgatctcggctcactgcaagctccgcctcccgggttcacgctattctcctgcctcagcctcccgagtagctgggactacaggcgcctgccaccatgcccggctaatttttttattttttatttttttttattttttttttatttttagtagagacggggtttcactgtgttagccaggatggtctcgatctcctgacctcgtgatctgcccgcctcggcctctgaaagtgcgagtgcctgttttttaatgtacaacaaatgtttcttgaagacacggcttttacattagcatattacatgaaagtgtgagggtcattaatatgtgtgaagaccagttaggattttaaagttctgatcagatacgttatcaagctgatagattaaattaactgattaatccaaggaattaacattaacaagcaatgaaatggtcagtatccaagtattgaagttgtatttgggttttacctaatattttccttgatcttactggctactttgttgtctaagctgaagaaaggccttcctgattacctttatttaaataaaataacagtggtgaaggtaatttcaaaaaatattaactatgctaaaacatatacctgtggtttgatatacaagaagctgcagaaggttctcagaaatatgtaaaacaatttattcccaaggtaattgataattgtatgcattcttacagaataagctgttataaaatttcaaactttatctaaaactcaatagcacgtctcataaaatgaactaaatagttctgtcgggcataagaatgtcggcttctagtatagaattccatgtatggtacaaaagttgtagagagattgtgtaattgctacattcatcgtataattttagaaaaatcctcttggtaatttatatggtaaaaattgactgttacaattagaaacataaggcatattttgtctcaatggattttattgagtatgctaaagcaatacacactacatatcgggtaagtgtgtgtactatgaggggagaagtatatggatacacagatcatgatttctatgtaaaatttatatcaggcttgtatgggagaagatacatgacaagttaaaatataaaatgaccacataattaaagtataatttaaattgggattattataatttaaatattttcccaagaatatcttgaatagtaatctttaaaatttttctttttttgatttttttattatacttttagggtacatgtgcataacgtgcaggtttgttacatatgtatacatgtgccatgttggtgtgctgcacccattagctcgtcatttaacattaggtatatctcctaatgctatccctcccccatacccccaccccaccccaccccaccccaccacaggccgtatgcagccataaaaaaggatgagttcatgtcctttgtagggacatggatgaagctggaaaccatcattctcagcaaactatcgcaaggataaaaaaccaaacaccgcatgttctcactcataggtgggaattgaacaatgagaacacatggacacaggaagggggaacatctgtaaaatctaaaaataatttagtttcaaaagataactttaaaaatgtctaaatgctagtggtaaaaattaaatatgtagatgatttattaaacattttaaaaacctcatgaaaaagggaatgtgcgacaaaagactaatttgcagctatcaaaaaataggaacagaaaaaatgtgctagcatattaatataaatattaggtgtcattgtgtgtccgagcaacattgttatcagttcccatctagtaatgactctctgtgtgtgtgcagtaaaatcaataataaaggggatgaataggacgactttcatttgaaactaaatctcttggaattgtgtgagctactgtgccacctatcagtggaatgatgaaataattcatacatgaacaattagcttaaataatcagcttaatttagtcaaatttattacaggcaccagtttacaaaaataattggtgcccaagatatttaatacttgggaataccagaattagagtatatcggagacaaagtgaaatctggatactcaatatgatacgacttttttgtttaaacctgcatatttaaactctcctttggtagttggatgctggctccccaaggatactcatgtcgaaatccctagaacctgtgagtatagtacatgatacatgacacaggggaattaaggttgttaattagctgatcttaaaatagggagggagattaacctggattacctgagtgcacactatgtagtcaccggaatgcttaaaaatgaaagaggcacaagagtaggcctgagtgatataatttgagaaagactatacctactgttgttcgctttgaagaatggaggaagaccaggggttaaggaatattggaggtctataaaagctagaaaagggaaagaaacatgatctcttctagaatttccagaaaggaacaaagccctgctgttgcttgagtttagtctaataagactcatgtcagatgtctaacctactcagctgtaagataaaacatttgtcttgttttaagccattaagattttgggaatatgttacaacagtaattgaatactactgcactctctgtagttttttttctgttcagtttcttagctctggtctgttgtacttggctgttcagctttggggcctgacaaactgccctcaatggtagaagtccagcagtgctcatttctatagggttcgggacttgaatcacaaaaggcacgaagggaaaaactttttccctcaccctagacgaaagtccatattttttttttttttttttgcgaggatctgacattttaaaagatgtttagcagtagaaatccctactgttttcagggaatattatcctctacgcttcttacctggcacagtcatgggacaattacatcaacacacaatactttgtcctatatattctgtattatttttaattaacagcatcaactgacaaatctatgttgaaccatatgaagcccaggtctcacctacagtctcttttccagtaatattcagacatatatcagttttttagaattcttgctgggattgcttcttgtatggttaaatgaatgtgctcatgtgcatgggtatataattatgtgcatgcacacatggacgtgcgcacactgctggacatccaaaattgagcagcgatgtgcacagggcataagaatgtatacttgatacttaaaaggatttctaaaatttttacacagtaactgttgccatccttaagatagctctttccttaagtatgcaaaaacagttgggctgtttcaaatgcttatggaagcatctgaaatttccttgcagaagaatgtctttgttttaaatttacatgtctaaataccaattggaaaggtaaagatttgctcaatagaaaggagtaatctgttaaaagtttaaaaaataccgatttcttttggaaaactgcgaagtcctgaattcagaggtcttattcttgtttattctaatcaccccatctgaaggaagcataactttccccaatgactgaaataataacagtaagaatgagaatacatggaaaatgatattaaattcttaccataaacaatcttaaaatttttgctttgaggttaagttttctgagaaattccatacttgcttaaaatatgtttttacaaagtaataactgccattattatttacaacacattaagtactatcctagttatttcaattgcatcctcccattaatttcctagcttggtaggattccccccccaaccagaaaccaaacttaaaaactaggaacttccagtccagtctgtatccctagatgtaagattctgacctggataaattgataatgctgcgaaacaaagtgacctagaaatccagctaatcttatcagtgctcgtttttaattgagaaaatctaattactcagataattgtggagcgtgttgcatactcttaattactgtaaaaacaaaaaaaaaagacaaatttatgctgctatataggcctcacgccctataaaactggatatacttttttatgacccatttagcttcattcattttatcagtgcatagaatgcagtatgttttccttatttcatactattttgttttactttttgtaaccataaaacatcagctttcatgcacaagcatatttttggttggatgagtttgtttaattaattaagcatttgagaacatcagtggtttagttttgaggtgtcacaaatagaaaaacttagggaaaatttctcattgtattggaaacaatttattctgcattaataagttgatataatttggctctgtgtcccctacccaagtctcatctcaaattgtaatccccacgtgtagagggagggtcctggtgggaggtgattggatcagggaggcggttgtccccatgctcttcttgtgatagtgtgtgaatgctcatgtgatctgatggtttaaaagtatttgacagccttccccccgaccccactgccctgtgaagaaggtacttgcttccccttcaccttccaccatgattgtaagtttcctgggggcctccccacccatgtagaactgtgagtctattaatcctcttttacttataaattacccaaccacaggtactctttataacagtgtgaaaacagactaaaacagaaaattggtgcccagatagtggggcattgctataaatatagcaattatagaagtgactttggaactgggtaactggcagaggttggaacaatttggggggggggtcagaagaagacagaaagatgagggagagtttggaatttcccagagacttgttgaatggctttgaccacaatgttgatagtgatacggacaatgaagtccaggctgagatagtctcagatggagatgaggaacttgttgggaactggagtaaaagtgactcttgctatgctttagcaaagagattggtggcattttgccccttccctagacatctgtggaactttgaacttgagagatgatttagggtatctggcagaaatctgtaagcagcaaggcattcaagatgtgacttgactttttctgaaaacatacggttatatgcgttcacagagagattatctgaaatgggaacttttctttaaaaggaaagcagagcataaaagtttggaaaatttgcagcctgtccatgcggcagaaaagaaaaacccattttctagggagtaagtcaagcctgctgcagaaatttgcataagtaaagagaagcagaatgttagtagccaagacaatggggaaaacgtcttcagggtatgtcagagacctttgtgccagccccttccatcacaggcccagaggcctagaagggaaaaatggtttggtgggccaggcccaaggccccactgctctgtgcagccttgggacctggcttcctgtgtcctagctgcttcagctccagccttggctaaaaggggccaaggtacatcttgcaccattgcttcagagggtgcaagccccaagccttggcagcttccatgtggtgttctgcctacggctgtgcagaaggcaagaaatgaggtttgggaacctctgcctagatgtctagaggatgtatggaaacacctggatgttcaggtagaagtctgctgcaggggcggagtcctcatggagaacctctactagggcaatgcaggggggaaatgtggggttggagcccttccccccaccacagagtcctcactggggcactgcctagtggagccatgagaagaggcccaccatctagaccccagaatggtagatccactgacaacttgcaccatgcacttagaaaagctgcaggcactgtgaaagccatgggggctgtgctctgcagagccacaggcgtggagctgtccaaggtcatgggagcccaccccttgcatcagcctgccctggatatgagacatggagtcaaggcagatttgggagctttaagatttaacgattgcctggctgcatttcaaacttgcgtgggacctgtgtctactttgctttgaccagtttcccccatttagaatggaaacatttacccaatacttatacctgcattgtaccttggaagtaactagcttgcttttggttttacaggcttgtaggcagagagaacttgccttgtctcagatgaaactttggacttggaattttgacttaatgccgaaatgagttaagactttgcgagactgttgggaaggcatgactgtgttttgaaatgtgatgacatgaggcttgggaggggccgggagcagaatgatatggtttggctatgtgtacccacccaaattttgtctcaaattgtaatccccacgtgtcaagggagggaactggtgggatattggatcatttgggggatgggggatgggtggttcccctatgctgcactcatgatagttctcacaagttctgatggtttaagtgtctggctgttccctgccccctcctgccacctagtgaagagagtgcttgcttcccctttgcctttcaccatgattttaactttcctgaggcttccccagccatgcggaactgtgaatcaattaaacctctttctttctaaattacccagtctcaggtattccttatggcagtgtgaaaatggactaatacataagtatactaagtgatagaactacctagaaagaataaatccagattaacttaagatgctcttggaatcagtgtttcagtgtaattgactgtggacttaaacagctttaatggagaagttgcatcttacgaattgtttctttccctccggtcttagtcccattacttgaaagaaggggtacttggtaaatgttgattacgttattaaaaatattttaacttatttttagtaaaattgaataactctcttatattacaatcgtggaacccttgccctttagcaggccatttctcctaaggaatttcagacatccctaatcttaacatctttatataatgtacatactgttgtgcgagtgtatctttctaggggcccatttatcttaaaccgactttcctatgttcctatcatttaatgtgtttttccattggtaatgatatatttcttctgttccaggatgggccagatatcagatatcacacattgcaagtgtaaactaaagcccagagcagaaattcaaatggaattaaagtataaataaaaatataggtcagacagaatatggataggttgtaggaatagatcagatgccagatgtagattttaaaaaacatgttcagaaaatatagtattgaaaactaagaaagagcactccagaggagctttaaaaaaggagagcgagagaaagaaaaataatagaaaataaaactggaggacattgttaagtgaaatcaaccaggcacagagacacaaatattgcaagttctcactcatatgtgggagctaaagtaaattgaactcatggagatagagagtgggatgatggttaccagatgctgagaagggtaagtggggaggacaggataaggagggagtggtaaataggtaaaaaaaaaaaaaaaaataaaaagtatatagttagatagaaggaatcagatctagtgtttggtagcaccctagagtgattatagttaccaataatttatatttcaaaataatagttaaattggaatttagctaacataaatgataaatgcttgaggtgatggatgccctaatttccctgatttatcattacatgttgtattcatgtatcaaaatatcccatgcaccccaaatgtacaactattatgtagtcataataactaaaataattaacgaaaatgaacctcatctaataattggacatttctctcgctagctataaataccaggctttcagtcagctctacttttagtttatgaatgaataccatagaaacacctgtaatgtcctccagtcaaaggtgttgatcacccaaagctgagcttgttaaatttacagggaaagggtaagcaccaccttcagggaatagtcatagcctctcagaagaggagcatgacggaaggatacttaagagttttacacgctgagctggatggttctaagtatgctctcgacagattggtcagaattagcttaccagatgagttgctgtgacagtctgtggtgttatcttggaacacatgagtttgcccgagtttctgtaaatctacttgagcttaaacaatttgatatgtttattttccccaaacgattttatgttagccatcacgggtaattatgcttggcataagggactcttgcttgatataggggggagtctgttgtatccgagttcttagatcatcctatattacatcctatattaactctttaggatacagggattgattagggagtgatatattagttcacttacatagggagaaatgatcaactcagaatatttttgtccctttaaaacgtctacctctatgtaagagtaaagagcataggctcttgagctgcactgtctttgaatcctagctctgctacctaccagatgtgtgaccttaaaaactttacacaagcaattagttcgtcagtttcctcatttgtgcaatgtggttaataataaatgggttaatgtatgttaaatacttcatatagtacagagtaaagactagttattgtaactcatgctattgctgatttttaaatgatgtttattttaattcaattgctgttcccccttgtaaacgtagaaagaaaaggttaggaaagggagatgtagaattctactaacaatgacttatattagtagttgggccaataggccctccaaaggagattcatcttgtgggatgtaagtgcatatagtagaatatgtcatgaattaataacggcattcaaaaatgaagcaaagacctgtttaaatgacctcagggagaaatcagaaacttttacagcagtatctgctttaggaaatagctagtgatttaccatttcaaattatgaatggccaaccaatgccctcatcagttaggcattgacagcccattcttctagttctatcttcttctgtaccggtttcaggtgtttccttctattactccttgaattggctatggcatagtcagagtatcaaaatcactggcttagttaggacctcctagtgctctatataaatatattggtatttttatctttttgacttggaatggtttcatttaacatgtaagatacttagatgttgagcccatccttgagaagaataatgtataaacctcaaagataaaacaaaatcctctcattcttgatcagtgcttttagtttgagcatgtcacttggattactgtgtctctggctctagcattaaaatagtcaacctctgaaatagcaaaagtggtacagaaactcgtatattttggagagtcatcacagggaatactatttagttatatttaaccaattgttgttatgcatctttcaggggtgagacactgaaaatattgcaaagacataatcacagcccttgatataatagtagtttgaaaaaagccgtattggggcacagaaggagtagtggcagagtgtgtgtgtgtgtgtgtgtgtattaacaaaatgggattagggaatttgtcaatgatgagatgacatttatgttttcacttgctgaaaactttagaaatctacttagtttgctaggtttgtagtggcttctgttttcatctgtagtagttacaccttaagtgtgacaaactttcatttacttaatcagtttcagtctttctaaggctggcatgatcactaaatgagaatagactcatcttaattttcacatggcttcaaaattatagaaatattaatccttccaaaaaatgtttagatgtagtccaaaagatttgtctgtggtctctgaaaagtgtttcactggagataaagctaatccagtttaaagtaactttgtaatcaaaattaatattgcatgcgctaatcataggctctccatgccttcacttctagtcagatccaggctcattgggagtcaagtgccagagaggtcctgcctcaggacctttgtacttgctgatcctttaatatggaaatgtgttttctccagagagtcatcacaggattcaactgcttatttcattcaactctatttttaaatgttcctgtagttgaaaggctttccctctctaaatcctctcttaagtagagccaacctctccatgccttttgttccctctctttaccttgctctatttttctttataggacttgccatgacctgattttgtgtagcatatttatttgtccttatttttatttctagtcctagaatttaagcttcataagttaaggactttgtacattttattcactgctatatctcctggtcctaaaacagtaggaacttaaatgtttaatgaaaaacataaatgaatgattaaattactaatagaatctgtattccctctccaaatgtacatttggtattgtactaatgtatataattttatgcaactcataaagtaatcgacatatttatattgctttcaaaattagcgccctcaaatacatttaggttagaaaaactaaaattaatacatcaattgatcatcaagcatagaaaaggaactccaagaacacgtaaacattttacatctaaggtcttactatacttttggtattaatgtatattgtattaaatcattgtaaatgtagttttctattccgaatagcaatactagaggaatttactttaaattctacattctctgctggatgatcccccaaaactgctgcccagataattacagttccctctcttagcttgtcttccagtctctaatttcctcctactttaaatcattgttcacatgccaccacaattagtgtttgaagatgacaggtctaagcatgtcattctcttgttaatacaaccccatgttctttctaaacaaaatccggctttctatgcctgccttttattgcttcccaccatgtgttctgtacccattcttaaactaaccttcagttacaccaaccttgggaatacatgttcctgaaccacaaaagggtttcctccatgtttttatcttacagaagtcacttaccttagtacttcatgcatagtctgtactaagtaagggtttattggtgatgactatgtgttcaatcttttaaaaactttgccactgtcctagaacttaaagatgactattccatgaagctggtttatatttcaaagataaaatgtcatatttattataagcctcctgtttttttttttttctggtttttcctggatagtaatgtttactcaatttactaataaaactagaatatatcacttggctataagctgtagtaccacagaatttgaggtgacacagaaaaattattcatctgctcttatatctttccaagggcatgattagtcttgatggcctggtgcaactgaattctattaattcttatttaaatcatcagaaacaaagtgtgatctcgtgtcactgaattagctaaacaaccttgctgctttaacacataagtgccaaaatagaaaggagcttaaaacaatagtttatatgtagcccaggtataagtccaatgtaggtgttccttattggtgactgatatggtttggctgtgtccccacccaaattgcatcttgaattcccacgtgttctgggagtggcccagtgggaggtaattgaatcatgggggcaggtctttcccgtgctgttttcttgatagtggtaagtctcgtgagatctgatggcttcataagggggagactccttgcacaagttaccttctcgtctgccaccatgtgagacatgcctttcgcattctgccatgattgtgaggccaccccagccacgtggaaccgtaaatgaattaaacgtctttcttttgtaaatcgtccagtctcggcaggtatttatcagcagtgtgaaaatggactaattacagtgactaatatttttctatatttttctgcctttgttgtggctctaccttcttcacagatgatgatgttttttgtttttttgttttttcatatagccattgaagagggggaagcaaatacagaaaagccacagtgacttcttagaagccttgtggtagaggtgatgcatatgtgctcccttcactttccacatgaaggggatgtgtgctcatgaaacatgtatatagccatgcctgtctacaaggataatgcagtggctggctgagtggctgcttctaagtgaaaaatctatactttaaaagctggagaaaggacatggttgtttgacagcctgtctctgccatagttaggaactatcagcttcataaataaaactatctggtggtcttctcaatggggagcttaattacctcaagtcaataagaggaaaatatccattagattcaattctatgttaagaaaatcgtggtcccagtgggattataatttctaaaatgaaggaatgtcagtaaatttaatggaaccttaagtataccatagaaaaaaatgatacattctgacattgaattttgttgatttaaataaatttattgtggtaaccatgctggttcccttcatgacatatgaatggggaattaaataatatacacaatgctttgctgaaaagtgttcaatttgtgttagatcagatacacttgtcttggtgacaaaattggcacaaagctttatgaaacccacgagtgggcaaagattgtatcagaaatatctaacggtataaagcaattttgtttttcattgttacgatattgacacatctccaagaaacacatccagggatgaatagctctattccccaaattctaaagacagcatctgacggaaatctaatttcagtcttgttattaaataagttttcttagtgtctgccatagtagacagtgtttgcaagatagcatattcattttttaacatatttttcttttgtgtgttataaataaaattaataaactgtcatattctactggtatccactgacgtttcttagttttactttaatctcaccattatgtaaattgactttgacagaatatttttagttgaaacattgctggaaattgaataaagttatgtgtgtgtgtaactcctgtgaaacactcaatgttatatctatatctcttatcaatagttaagcctttatgaaaataattgattctttagcatggtgtattgcacctttctcccaaacagagatttacagacacatagtagggtgtgtatatatatagatgagcatcaggtataacacataaatgcttatatatctaattggtgttgaggtctgaattaatgtatttttgaaagcatcggttcttgtgacagtagaatcaaatacttgcataatgttttatagactagttataatccttacaaaaatcctattgacaaaatagcattagcttaatattccagatgagaaaatgggctccaagtaattagatgctttgttcctgatcaaacactaagtggaaaaaaacccacctcattacaaaattttcttgttgaaagacttcagactgcctctaaaatagaggagagaagaaatagtctgacactctaaattggatataaacgtcagaattgggactataagtctagaaaaagtaagtatgtttaatggcacatatagaacttacagtcttaacaaatgaagctttttggtcaattttggagtatgatcttctataacacggaaaatcattttggggttttttttcctgaataattcataaatggagatggactaaagaaaatataaaggaaatagcataggaaaattttgtaaaaacttatttggatattttatgatttttctacatctgttttctaaattttacaccagggttccctttaaatggctacttttttggaaaagaaatctgagtatatacccatatgcaaatgagcctcaaaaaatactaggtgcctttagcttctgttaatatgaaattactaattcatgatgagaatattttattttaatgttagcggtgttgcttttggttggaagccaggtaaatgtaatcctattactatgcctataatgcggagtagttttgtttaatggtatgtattaatgcggcattggacagcttgaattgaatcagagaaatggtgttggcaagcattaaagactttaagagaatgcaaattttatatgcctctttttattgtaaattgacaatatataattgtataaatatatggcatacaaagtgatggtagaatttatgaatacaatgtggagtaattaaatcaagctagttaacatatctatcacctcaaagacttttgtggagagaacatttgaagtgtactctcttagcagcttcgaaatgagcaatactctattaactatattcatgctgtgcaatgcatttcaaattttcatcagaaaaatcagctttgaaagagtgtatgcaaaaattttataagcttctcagatgatatgatcttatatgtagaaaattctagagatttccacacaaaaaacctgctagaactaataaattaagcacaattgcagtaaataaaatcaatatacagaaataagttatattttatgcactaacagtgatgcagtccaaaaaggagattaaggaaacaattttatttaaaatagtaacaaaaagagtaaaatacttaggaattaaccaagaaggtggaagacttatacactgacaactacaaaacaatcctgaaagaaattaaacatttatttttataaataaatgaaaaggaaccccaggtttatgaaatggaacactcaatattgttgttgaggtatccgagttactcaaaacaaactacacattcagtgccatctctaagaaaatcccaattagtttttctgcagaaatagacaactctatcaaaaattcccatgtaatctcatggatccaggaatagttgaaacgatcttgaaaaaagaatgaagttgaagggtcatacgtcctgatttcaaaacttactacaaagctaccataatcaaaacactgtggtattggcttaaaaaaagggaatgtagaacaatagaatataatagccctgaagtaaactctactatatattgtcaaacaattttccataaggttgccaaggttttttaatgattttttaatgaagccacaaatgttgctaagaaactgaatatatacatttaaaataaatgaagttggactcttataaaatacacaaaaattaagtcaaaatggatcaggaagtaaacgtggccaaaagtacagaacttttagaagaaagcgtagacatttggaagaaaacataaacattagattgggcaattaaatatcttggatatgacactaaaagctcaggctacaacagaaaaattaggtaaattgaaatgcatcaacattaaaaacttctgtgcatgaatgaacaccatcagagtgaaaaggcaacttacggaatgggagaagatgtttgcgaatcatatattcaatagggaattaatatccagactgtgccaagaactcctatatgttagtccattcttgcattgctctaaagaaatatctgaaactgggtaaattataaagaaaagaggtttaattggctcacatttctgtaggctgtacaggaagcatgatgctggcatctgctcggcttctggggaggcctcaggaaacataaagcagaaagggaagggtgacctggcaggtcatatggtcagaacaggagcaagaggggtggagggagatgtcatacacttttaaacgaccagatttcataagaactctctatcacgagaatagtaccaagcggacagtactaaaccattcatcagaaatttgccccagtgatccaatcacctcccaccagacaccaactccaacattggggattacaattcaacatgagatttgagtggggacacagttaaattatatcatcgtagaattcaacaacagaaaaacagcaattaaaaaaatgaataaatgagttgatcagaaatttctctaaagtttggccagtaagaccatgagtagataatcgatatcgctgatcattagggaaatgcagataaatcccaaatgagatagcacttcacacccattaggatgatgattattttaaaacaccaaaaaaaaaaaaaaaaacccagaaaataaatatggttgaggatgtggaaaaatttgaacacttgtgaactgctggagggaatgtaaaaccttgcagtcactgtggaaacaaatatgttggtttctcaaaatatagaacgtagaattaccatgtgatccagcaattccacttctgggaatatactcaaaagaattgaaaaaaggaccttcaaaatatatttgtacacccatgtttatagcagcattattcatagtagcaaaagatggagcaactcaaatgtccatctgaagatgaatggataaacaaaatgtggtaaatgtatacagtagaatattattcagccttaagaaagttctgacacacattatagcatggatgaatcttgatgatgatatgctaaggggaaaaagccagatacaaaaggataacatatgattctatttgtatgagctatctagagcagtaaaatgcatagataaagtagaatggtggcctctagaagctgggggagagaaggtatggggagttatttaatggatatgaagttttttgggggaagataatttttggaggtggatggtggggatggtgacacaacaaggtaaatatacttaatgctgataaattgtatgcttataaatgattagaattatatgttttatgttatatatattttaccatgataaaaacctataagctttcttgtaaagttttagaaaatgtttggattcataagtgttggatgattgagttttatagtgtaaatttaatgtagttgtgctcaattgtcaattgtatgcctattgtctgtgagtatatattttccagattgttctctaaacataatttttaaccatttagttggaaaaaaaaaaaacctcaacttaaacccaaatggaattatgtagtccattcagtgcatactgtgaaatatattagtaacattttattcattttaaagattttcgttatcagtttaggaagaatgataattttataaatccatagcatactgttgttgtgtgcgggtaatactcattatttaggctgtttttaatttggggtcttttttaacagataatcaacaaacgttttttatttgcacacagtactcttagtatttcgttttgcttcagtaatagtaaatgaggctggggtttggagagcacgattgcttttggaaaagtcaatagagacatgtttttatcgctactgctttttttctatgttaattggaatttgacgtaaaattgattctgaaagatatcaaggtagacacttgaaatatagattggacaataaggttggtagaccattactgtgctttgaactagagtcattaatgtgattgtgaaaatttttactttgtatgttattcatcacttttctcccttagtggtgtttagagcatgatgagttgttactgtactgacaagtattagtctagtagtaatttctcataggctgacaagtgccaaaattcatcctcacatatgaatacactaaagcagacaaacactgttttcatctctgacactatctacagtttatcgtgatacattattttggcctacagggtcacaggcaaattatatttaatcactgctttaaactaaaacataactataaatatttttgcactctttaaatcagcataacaatccaatagacttcaagatcctgagataatatttaataacattaaaatgatttaaaagtataacgattgtattaaataattctgaataaacaatacttttgaatgaagaagattaattagcatgatcattatagaaatggtcctattaatacaaagatgtcaagagtcatttctggttcaagtcaattaagctacgttttaattgaaaaaagctgttcattgtgtacagcggtagcactcctgacatatcatataaatgaccccattaatgcaggagaaataaggtcaactgagacatttttactgaaaccaattatgttacattttaattgaaaaataaaagctgcttttattcaaaggaagcaccactgacactccatcatattccatagcctcctaatattgcagtaacttcctaagcagtctctcagttcttcgcattatacaaagttatctttttactacattaattaggtcatgtgttccctatttaacaccttctgaagactctacattgtacttagaaaaatgtctggagtctgaaagcagccagcaagaccctgtgtgatctgtcccctgcttgcttcttgatctcacttcacactggttcccttacttcaccaggctccggtcaagcaagaacatacttcttctccctctttatatagctgacaacttcctgccattcagtctgagccgaaaggtctcatcttcagaagaatcctttgcagtctaccatatgtaaaagagctctcctgatgagccctcccagccattcctgtatcctattcacacttcttgctttaaaatcatcatcattatctgaaattaccttgtttgattatctagcttatttcttctctgcttcccctactagaatgtttggtgtcaaggactttgtccgttggcttcagtactgtatagccagtagctaggagaatgccgaagagatggtaggtgaaaaatgtttgtggaatggataaataaatgaatagcaatagtacagaagtatgccatcttatttgttaataggtgaccatcggttgatagagtttcatttctcctgattgcttaactcagtaacactctcctgcaggagagctagtcaggactcagggtttttttgttttttttgattttttttttctttttttttctttttttgagacagagtcttgctctgtcacctagactggagtgcagtggtacgatctggcctcactgcaacctctgcctcctaggttcaaatgattcctcctgtctcagcctcccgagtagctgggattacaggcgcgtgcaactatgcctggctaattttttgtgtttttagtagagactgggtttcactgtgttagccagaatggtctcgatctccttaccttgtgatctgcccatctcggcctcccaaagtgctgggataacaagcatgagccaccatgcccagcccgaggactcaggtttaagtatgtgaacagatagttcagaagacgttataaactgttaatggaaagtctggaaggaacccagagatatgttttgtttgatctacaccttactacagatttgggtttctgttagcagatctagcagctctggggcaacattctgcaatggcaccatcctggtagtactgaggagtgctactctcctccctcaaagcgggcacattactgttcagtctggagctgcactcgccatacacacagtttatgtaactccactgacagactctgccactccagtcatttatggcatctgactttgattccacatggaaatctactgggtggacctgtcacatttaaagataatcatcatcatcattgtgtatgtgtgtgtataagttacattggccatttttctggggactgagtctgtctactccaaaagctgtgaaaatagtaatgattaaaagtcctcagactctatgattgtggaaattctttgtattctagaagcacacaattctaagacttctgagtgtctctcttcagtctcctgtgaagagcatcaccgatttatcactaaatgagcagattatatactggggatttagtgtagaatgtgccatacagtagctgtgcttcttgaagaaatccctggataggccaggtgggtttatggtaagagataaaattaaatagacgctgcaaaaaaaggagacaacattattaaagtcacaggaacaaatgacacttgtaaacatcttggacatgagttgataacatttaagtgtagtccaaagagttcaaataaaaaggcattgcaatcacttgagagagagagagaaataatgcccggagagtacatttgggctatattttagagaaaggccttgataggtagaaatagggaagaatagcattccaggtgaaatagcaaggcaaaagcaccaatgaagaagaaataagaggaaggcatattcaaggtatagaaaatcatgtcattatgtgaggtacaaaaagctatcgagtgtgcatttatatatgaggtatcatgctaggaacccaggatagctagatcaaaaggtatgcattaaagacattttgactaatttccaaatgatcataatgatgcctatatgcaacatcaatatatgaagtattcagtttcccattccttgcaagtaaacctgaatatgtttaacattatatcactctgttcttccctcctgcaaccataattcataagttattttcaccaattcattcaccaagcatttattgaacactatgtatcatgtctctgattggcactggggaaacaaatgtctctaatctcaagggacatacagtagaatgggagagagatacagttcctttaaattctggacctttccatttctcttctattttcaatagagcttgcagtcatggaaaatttattctctgtggcaacaaagtagggcagatatttgccctggaaggtgaagagagatagagaaggctttctgcctaacatttatcatgaggtactaacaaatatgacaattgaataatgctgttaaatactatgtggcatactgattccatttcacatacttatgtctcctctttttaatagaaggtagtgtaaaaagaagtcctgtgttacagtaatgtttcttttattatctaattgatccttgggtacgttacctaataattgggtatgtacatctccacatacatagcagtggaatagtaatagttggggggatttttgtgacatttaagaagaataattacaagagtcaaaagtataatataaacacaaaataggaactttccatttttcaatgcagatttattcagcatctttgcttctgattccatgtatttttctgcttcagaattctttttttatcctctatcttattttacagttaataatttcctgagggactactttctgagtggaaaattgttagaatcctgaagaaatgtatcacatgggcctgcctgggtcttcccccgccccccccccccccccaagaaaaacctgcatctgccttaaacataagatccagtagtcagtatgaaattcatcaagctaaagcttatctcgtctgtagttgtagctctctgaaactttaaaaaaggagttttaaactttgcatatctgaatttctgaggtagcattatatatgaaaccaaaaatatataaaataataagaaaattgctaaagaatcactttgtgaaatgatgaatccatttagcttagttcttctgtttggatatgatagccttattgccatagagaaattgaggtaaggcattaagagaacaagcaaacaattttgcagtaactaactcatctctcccatgttgccaggtgtgccgcatattgctgagcagtgaaaggattaagctaggaaagaaagtggggaaagtgctacctggaaatcagaatgaacattgaatatagaaatgcatctaagggggaatgagaaagagaagagtaaattaggtttttcttgagtcctgtctttgttacttccacattttgtctacaggattaagcattcagtgcctgataagtttagtattgtgccagaggaccccagagaaaaattagaaatgatcctttccttctagcaactttcagtgtaacttgagagtcaggactgaccaaaatagttcaataggtctgaagtaaaattatttgtgaagtagtaaatttcactttatagtgtatgaatgctgtagaaatatatgagagaaatcaacaagggctgtgatggaaaataggaaacatccagaagtagaagttgagctgaaacttaaagatagttagaattggataagataaaatgagtattcccagttgcaaaacaatgtgagagcatgtttcgaaatagagaagagggatgggcataggaaaaacatacagatgaagtaaaagagggcattttatcttttttatttttttcattttacatgtctgttttgtttgtggacgcctatttggtctcattgttctggctttgggagacaggcaggggatgctgcggagcacatggcccctatttgtggtcgttttgctccaggtgaaaataatagccaccctttattgaacacatcctgtgtttcaggcactgtgctaagctcttacactttgttatctcgtaatcttgagaatacctgtgtgagggcaaattgcagtaagagtaaatggggggtttgattccgaagtctgagattcttgcctttatgaccactgacagttaaggggcttgttacataattacaggaactcaagagtcttggtcgttgaataacaatggatcaagtgctgtgctgtgacccattattttatcaagtggatggaataaaacatgactactgtgttcatttggatgagtaggagaatgctgaactttgaaaggttatggaaggcaagcctgtagagaggtaccaaaatggcatgtagcaacacgcagggaggagaaagacctggatttaaatgcagtctctgccatctagagctgcgtgagcttgagaagtctgcatcatcttccctctctggcccctaaagctaaagaattaaaatgtatcaccactgctctctaagagttcagtttaagtgacagcaatagtcaagagtgtcagtttgagttttcccccaaagcaaagcctgacagaaagccatgattggctgattatcaaagaaactagtaagaaaactcaggaacatgtgggacctggaaaagtgagacaaggaagaaggaaaagctaataaagataacattgttgaactgatgaccataataggtaactgtacctcaaccttgcctgggacattatagaaccttatagaactgtcctcagaaatgtccctttgaaggacaatttattttcctccctcctcttcctcctcctcctcctgttgctagagctaggaagtgaaagggtgttaaccctctaacagcagaaacaggaactgcagcaaaaatgagagatgggttgatgggatacagtgcaaaatacaaagaggcatctactgttcaaaataaacctataaaggaatctgtattagtctgttctcatgctgctaataaaggcgtaccaaagactaggtaatttataaaggaaaggtttaattgactcatagttctacatggctggggaggcctcacaatcatggtggagggcaaatgagcagcaaagtcacatcttccatggagacaggcaagaagagaaagcatgttccgggaaactttcttgtataaaaccatcagatctcgtgagacgtattcactatcacgagaacagcatgggaaagacctgccgccatgattcagttacctcctaccaggtccctcccatgacatggtgggaattacgggagctacaattcaagatttgggggaagaaacaaccaaaccatatcagaatcgaaagaaaaattataaagtcaaagtagaggaaattctggagagccttgaaagttgggctaaaactagatagaatgtgtatgtctcaacattttctattatatccctgaatcatataacttgttaagaatggggttacacaaaatttcagttaggttggagagggaaattcaagagaactgttgggtgtatataacaagactatagttaatagcaatgtattgtatgcttgaaaatttcaaaaagaatagactttaaatgttctcacaagcatgtgaggtaatggatatatcaattggcttgattgagccatttttaaatgtatatgcctatcaagatatattgtatactataaatatataaaatttgtcatgttaagtaaattcgaaattagaaaaaaaatggagctaatctctttaagagttaaaccctgaattgtagggaatttcttgctgacgaagactaatttggtcttgaagagaatttcatgtcaccatgaacttatggcctgacttcaaaccagtgatgagctgtggagggatatagggcactttgctttccatcagatcctctcttaagctgttttgcatcacttaattctaactgtaaagttgggaaaatgtagatggggcaagtgacagcatatggtttgatatatacttgattgtatccataagaacatcctcttacctttttaataagtagcttggagtgcttcctgccaaggctttcaccagttatccagaagattaaaggctgaagtagtgattgtccttggaatgtccctctatctatgtgtagatctgtggttttattcatttgtttcccaaattgatccacaaggagattaatcttgtatttttttcctgatgacttttataaactagatgcgtaagacatataatattgacatcatatcaagttgcccatagggttatttaaatatttgaagagatgtgtttgttctcttacactctctgaatgcttttggtttttagcgattttattgtcatcaaaaaccatattcgactacacatttttctgacctactagacattcacatttagctttgggtactttgtcattgtagaagcaagtataaagtaatgaaatttatgattcaatcagaaaacaagtattgaagctgctgaaatatgacgttctcagctttatttcttctacgaaaagtccaggttaatgtttataaaatatttttaaacttttttgtctgttcaggactgaatttcttgttgagccggaatggtgagataattctttcttctgtggaacaaatgcattttaatgatagttacttatatgaaaatgttactaagatttaatttatgcgcttaatgctgcttaaaataaatgtattcaataacaaaacaaagccaatagccatagcacattaattattgaatagactttctgtagttactgcaactgaatgacaggtagtaagaccttaatatttgcaatcacaattgtattcttctttgccctagattaagcttgctgattacagtgcaatgaagaaaaattaattagtttgctccagtggagcagttaatatagcacaagcgaaacccataccctgcttcctcctgtaaccaacttgttttcacttactctgccttttgatacacaaccattttcttgatcacttcccaattgaggaaaagtttaattaagtagctaatactatttagaaaatatagtgctaaggaaaaaacatgttattaaattcaaaccattgatatttttattgctatttaacttatattttatacctggcaagcaaataattgaatattgtttgaaaatatttgtaattaagaactcaagaatatgaaaacatcattgagttataaaacatgtattactcctcaaagagcaaatattcctgtgttgggctgctcttagttggagtaaacacattacctgcccacagggaacttttcatctattagaattcagaatacatttcagggattcttaccaaaaagatttagaatacagctatatgaatttatagaaatattttaacttcagaaggattgtgtgctcacttccgtatcttcctttaagattttagtcatgttccgttttttgtgttttttttccttgtctgaagacaatatttttagaggagagaatttctttgaaattgatactgtaagtaaatttactgtatttacttagaactactcattcacccatacaaaaaaaaagttgagctttcattattgagctctcctcattatgttataaaggaaaaagacattgtccttatcatgggagacaagcagatacatgggcaattcttcagcaatgtgatgagtagggaaagacatacatgatgtgggaaatagtgttttacagtcaggtcatgcattgaaccaaaactcaggccgtaaggaaaggctttgaaggggcagtggtaacttacctgacatgtaaaggagccagatgaaaaggatgttgcaggcagagaagctgtaatgtacagagaactgaaggtaaaataaaatatcagcttatggcttggcaaacactatggggaaagaggcacagaagtcacaatgatagtgggagccatctgcacaatgatttaatggctagggtgttatgtacagttatgtgtcttgtatattgcatcatttctataacagtataaatgctattgagtataaattagatatttattgacctcatattttacagatttgccgtgaaaatttctgtatgtttaaatctgcgataagtttgttattgactcattcatctaaattaatagcttgttcttcagaaaagaagttttgagactggttgtgatggtctcatcaggttgaagagatcatacttttactgtggcacctattttttttttttaatggtttatttctatttgagtaaaacagtggctaaggttctatggtatcgggataagatggtgataagtgatctatatgacagagttggcagaggaattaataaccatattgacttgggagagtgagctctgtatatagaatacacattttagtcaggagggcagagtggtaaaagtctgagatcttgagatgcactgcttgggtttgaatcctagctgtattacttaaaagctgtgtggccctcagaaagttagtcatactgtgtttcagtttcctcatctgtaaaatggcgataattgtatccatctgataagattgttttgaaaatatttaagtttaacatgtatgtatgtagttacatacatgtaaaagtatttaaaaaggtgcttggtagatattaagtgaccagcaactctaaatattgttttattataattagtaagctaccacaggttctgtgctgctgaataattgatcaataccttacataacatcagcaaaggggtaattttcaattttgcagatggcacaaatctgggtggggggtcaaaatgaagatgagaatttttcatgataggctaaatcacggggtcaaaacccacaaaatagaattgagcagggtttggtaccttcttaattgcttgcttgctttattttcaatggcttgttatgtaacaccaaccatgtggtcaacttgctaggttatataaaggtgaataaggctcggttccttccctcaagaacatattaacatgtagacgcaagtacagaaagggagaactaacattgtattataaatattctaaaaatgctaaattaacagaaatatgatacaaagtatagtataatgtagtatttagaggagataatggtttcacactcctttgctctgacaaagcatcaagagtctttagttatttgtgtcagattttaagaaagccaattaaatgttatagaacacccacagctgagggaagaatttgtactgaagcttggttggagtatactccctgtgtggcttactatgagtggcagtgcagagggtttgtggtggtcaaataggaaatctttatgagtatgaaaaacaaatttctaaggtagactcaatgcaaagtcgaaccacatctggaagaactataaattccataaatgttcattaagcacctcctatgggcaaagtgttctgttaggcctgaatgaatttattgaagacataagaaaaggctcatgtcttggaatatattgtcttttgaggaataccagcataattatgattgtataatagtttaattttatttttgatgtgtactatttaaaattcagagtgctataaaaatagtaaatcagggaatctgtatctggaggaataagaaatgaagtctttttgaaggaagtgatatttagatggaagtctgggtactagcttgttgtggagaaggaagagggtaaaggcatgagggaggaaaatacaggtggggatggaaaggtgttctaagcagggagaagtcagtgcttgtgtattagtccgttttcatgctgctgataaagagatacctgagattgggtaatttatacagcaaaaagggtttaatagacttgcaattctatgtggatggggaagcctcacaatcatggtggaaggcaaggaggagtaagtcacattttacaggaatgacagagggcaaagaaagcttgtgcagggaaactccacttacaaagccatcagatctcgtgagactttcactaccacaagaacagcatgggaaagacctgtccccatgattcaattacctcccacagggatcctctgacaacatgtgggaattcaagatgagatttgggtggggactcagccaaaccatatcattccacccccggcccctcccaaatctcatatcctcacatttgaaaaccaatcttgccttcccaacagtgcaccaaagtctttactcattccctcattaactcaaaactccacagtccaaagtgtcatcctagataaggcaatttccttctgcctgtgagcctataaaatcaaaagcagattagttacttcctagatacagtggggttacaggcattgggtaaatatagcccttccaaataggagaaattgtccaaaacaaaggggcttcagggcacatgcaagtctgaaatccagcagggctgtcaaatcttaaagctccaaaatgatctcctttgactgcgtatctcacatccaggtcatgctgatgcaagagaggggttcacgtggtcttgggccactctgcccctgcggcttttcagggtacagcctccctcctggatgctttcatgagctggcattgattgtggctttcctcggtgtgtgttgcaagctgccagtggatctaccattctggggtctggaggacagtggccctcttttcatggctctaatagacagtgctctagtagggtctctgtgtgagggctctaaccccacatttttcttttgcactgccctagcagaggttctccatgagggccctgcccctacagcaaacttctacctgggcatccaggtttttccatacatcctctgaaatctaggcagaggttcccaaaccgcagttcttgacttctgtgcacctgcgggctcaacacgacgtggaagctgccaaggcttgggcttccgccctctgaagtaacagcccaagctgtacctcggccccttttagtcacagctggagtggctgggacacagggcaccaagtctctaggctgcacaccacagagggaccctgggcctagcccacaaaaccattttttcctcctaaactccagacatgtgatgggaggggctgccacaaaggtctctgacgtgccctggagacatttttctcattgtcttggtgattaacattcagttccttgttacttatacaaatttctgcagtgggcgtgaatttcttctcagaaagtgtgattttcttttttatcacattgtcaggctgtaatttttccaaacttttatgctctgtttcccttttaaaactgaatgccttaacaggacccaagtcacctcacgaatgctttgctgcttagaagtttctcccaccagataacgctaaatcacccctctcaagctcaaagttccctataactctagggcaggagcaaaatgctcccagtctctttgctaaaatataatgagtcacttttgttcgggctcccaacaagttgctcatctctatctgagaccatctcagcttggatttcattctctacatcattatcagcatcttggtcaaagctattcaagtctctaggaagtcccaaactttcccacattttcctgtcttctgagctctcaaactgttgcaacctctgcctgttacccagttccaaagttgcttccacattttcacgtgtcttttcagcagcaccccactctactggtaccaattcactgtattaatttgtttttatactgctgataaagtcatgccagagaatggataatttatacaggaaaaagagtttaatggacttagagttccacgtagctagggaagcttcacaatcatgctggaaggcaaggaagagcaagtcacgtcttacatggatggcagcagacagagagcttgtgtggggaaactcccccttacaaagccatcagattttgtgaaacttattcactatcatgagaacagcacgggaaatacctgaccccatgatccagttacctcccactgggtccttcctacaacatgtgggaattcatgatgatatttgggtgagggcacagccaaaccatatcagtaggtataagtaaaataggtgaagggtggagatcaatcagaggaaagcacaccaaataggaggacaagttctcaatccactgcaaggatttgatttgtagtttggctttcaggcctttaactgtcttcagcttggaagtggggtttcactgggtacccacccctatctgcctaggagtttggctctgcttcctgtcactgtcatatgcacttctctgtggtttccaaaacctgacacagggaagaaatacaatacaggtatctgatttatagcaatctgttataaattattgaatgaatatcatattttaaattcatacctgatagatattttgcacatttcttgatttacttctaaaataagtggatttctcttctttccaaatgtaaatcaaatttcgcctaacttcatatgaaacacgggaagtttttctcccttttgtcagaatttttaaatgtatttatattttaatctgaagaaactagctttctcaaggatggatagagtttgaaaatgatagacatgattcagttttctaactctaatgctatgctagttttcatagagtttatgattaacataaatgtagcaatatacatgattttccgttagggaaaaatctctgtttattcttaatgttgtaaatcacaagtcaataaacacttatgagtgtcttctatatatgtagaaatgtactaggtttcatgggtaaaagtgacaaataaggcaaggcgtctgttttttcatccaatggaaatggctcacaatcacatttcaaaaaagatcagtgaactgtatataactacctatgtcttaatatgaacaaattgtgattcattggttcatataacagctgcaattcctaatacctaacatcaaatcttttttgctatgtgtggtgttagccacataaattctcactattgattcaataatgagttttttggcttttaattgtgtgtcatttttttgttgtttacagacatgataattttacgtagttctgccttggtgtctacctcaattatcagagtcttaaagagattatagcaactgggaaccctaaaagccttcagcaaatcttggctttagccaggatcctcaaataatgtccaaacgtgttaagaacttgaaatattgaacatttccacttcatttccattcattctttccatttccttaggaaaattctaataagaaatgtaattcttaggagcagagagcaggggaagaaaacaggataatttataaactgtttaataaccttgtgagcaattgaatgttgaccatataaattctggataatatcattattgtactcaggttggctgttaaaaagtcataaaggaaagaattttaggcatctatttctagataactattaaaatggtgatcttatcattgcataccatttagctggggagacagaattgtatttaatgaaatgactcatttgttgtattggattcctgccaaattatttcatggtttgtcaaatgataatttcacaagtgtcagtgacaagatgttggacattagttttctcttttcctatctgctgagtcacagttctcaagggatggatattatagtgattcaatcacaccttagattttggcttacatttactaatcagtctagtaaatttggtaggggggaaatcgtgccatagcatataaaataatgagttccatttcctccccacattggcttctattttttgggttctgtatgtacctaggacctaatggggcacttgccacgtaggtccccaatgggagaaaaggttctgttaattactccatcacattaaacagtccagttagtacccatagaggtgaggaagaatgtgcttatgttttatgcttcaggcaaagtagctaatcagagagctgtgaacaattgtaaggaagtgacttgctgcctggttctctgcaatgactgatgacacagtctttttacatcacagaatgtgtaaaatttgttcacatgtataagctcttgttactttgagagggcaattctgggataatttggttgccatattatacttagtcaatccctatgtattgataatctgttttaatttgcatgttgatatacttactgacttacctaataccatcatttatggtttgagatatcattcttaatttccctttaataatacatgtaatgcatgggtttacctagccctaagactcatttcaaaatatattttctgaagttctgtagatgtaattattaaaatcacaaactttcaaactggactcataccccagctggctatggtacttaatgaaaattaaactttttgctcctcagttttcttatctgtataacaggattaaatgccccaccctcgcagttttccttttttctttttcttttcttttcttttcttttttttttttttgagacggagtcttgttctgtcacccagtctggagagtgcagtggcatgatcttggctcactgctaccgctgcctcccgggttcaagcaattctcctgcctcagcctccccgagtagctgggactacaggcatccgcaaccacacctggctaattcgtgtatttttagtagaaacggggttttgccatgttggccaggctggtctcgtacttctgtcctcaggtgatctgcctgcctcagcctcccaaagtgctgggattacaggtgtaagccaccacacctggcctacactttttctttaaggataaaagggaaatacgtgtattaccattgtgcttgtcatatagtaagtaccaaataaagagtagcttctaccattattaaaagctatcctggcttttttactattattaaaagttattcaaagcctacatatagaaggcatagctatatgcctttgtgtcacatgaatagtcaacttttctaattttttctgtggctgtgctttgctctcaaagtgtggcctgcatcagagtcatcagggaaggtggtggttaaaacggattcctccccggcatgttggctcacacctgtagtcccagcactttgggaggccaaggcaggcagatcccttcagcccaggagttccagacaagactgagaaacacagcaaaaaatacttaaaaaaaaaattagcgaggtgtggtagtgcaaacctgtagtcctaactattcgggacgctgaggcgggaggatcaggattgcttaaacacaggagtttgatgctacagtgagtgcatgatcatgccactgcactcgagcctggacaacagagtgagatcttgtttcaaatacagtaagtaagtaaataaataaacccagcaaaacacagatccctaggtctcactctcacgcttgattgagtatgtctaaggatgtgggcaagattctgcagccacaactgtctcccaggtgaggctgatggtactcgttctccaactaaagtttgagtagctttgccctggagtagctgtcccaaacaggttaatcctcagaattgcctgggaagatttaaaatatatttcccaaacataactgaatcaaaatttgaggagacattgtaaaaaatccatttgaaaattgttgcgcaaattagaggttctcaaacttgagtgcacatcagaattttctggaggccttgttaaaacagattgttgagatacggaatcaacctaagtgtccattaacagataaatgaatttaaaaatatggcatataaacacaatggaatattattcagccataaaaagaatgaaatcctgtaattggtggtaacatggatgagcctggatactgttaagtgaaataagtcgggcacgaagagataaatatcacaagttttcatatgttagagctaaaaagtttgatttcatagaagcaggcagtagaatagtggttagcagaagccggggagggtaagagggaggagagggaggaaagggacaagctagttaacagatacaaaatgataagctaaataggacggatatgtactagtgttctaaagcactgtaaggtaacttcagttaacagtaatttattgtgcatgtttaaatagctagaagagaggattttgaaacttcccaacacaaagaaatgacaaatatttgaggtaatggatatgataattagcctgatttgattattacatgttatattcatataggaaaatatcactctgtacctcctaaatatgcataattatgtgtcgattaaacattaaaaagaaaacacagatttctgggtctcactccctgagatactaaccaagtaagtctgggagagtcctgaaattcggtatttctaaaaaggtcccaggtgacgctgatgctggtctggatccacactttgagaaccatagcctgccctagaccactgcttcttaactcattttaaaattaaggatctgtgtgagattctgctggatggtgtagattttcttgaaaaataaaaaacgtgaacatagtttccatatactttccagtgttcatggatcccttgaagtatgtctatgattcttgtatgaaagcttgactccagatagaacgtctttgagtaacatatcccaggttaggaatggaattctctggggctatttgcaaatctgtctaaacatgggaatatgccagtaacattttactccattacccagagaacaggaccaagtcatgttattacctgtagaatgataagagactttcaattctaagaattatggcttatttttacaacttgttggaatatgatttgcagatttggtgaaaatggtagttacttccacaaagatgtttaacaatttaaaagttctagaagtttgtgtttcctactggctttattctttatttttactcttcaaatctagctgttcgctgtctttttcctgaaacatttttattaaggaaaatacagaattttgcagcttatcagtttaaacagaaaacatccctgaaaagtcttcgactatatgactacattacttatacaaatcgtgatcatagtgaaactgaattactttgtaaataaccatgattcattactataagcagggttttgaaattatgactacctcgagaaaacttttattaagaataaaaaagcaactatctcagctggaccaataatagaaacaccagtatattcactcgctttttatttctcaaagcacatttgtggcttgtagccaagaattcattgcattgaaggagtgtttgacaagcagtattgaagctgtaaacactttgaactcattacagtgtctcaccataggaacttaactgtcactgaagacaccctgtctgtgaaaccatcattcctacaattatttttacctttgcctgaaaatatgcttttgtgctttaaggtatttcaaaagacaagagaaagatggaagctaaggaggctatagggatttcctgagttctgtgagtgctgtgttgatacagaacaagatcagaaacttggatatatatgtttcaacttaaaatgctgattgatcatcatgacaatagttttatagagcatttgtatgggggtgaatgtttgaagttataaaaagcattgtaatgttactcattcatgggctgaacaaacatttcctctttctctttctctggctttcttgccaattacttttttcttgccaattacttttttcttgccaaaaacaactgagatcacccccttaagtccattttgaaacaaacttagcaaggagtggttgttagtctgcaataacaatctacatctcaaactcacatccttacagttgttgtgtaggtatcatagctgcgtgaaacagtgaagtgtaagattgtgtctacagtggtctggaaaatttgactcataatcacatgtagaatacagtcctttaagaactctcccaccccgcatcactgccctgaagataatgagccaatgatcctgatggtaatctcttctaaaatcatacgtatttgagaaaaattgtatcttttcggagactggtaatagtccagatgaaaagtgtttatatcctgaacctagagtattgacaaagcagatgaagaggattgattgggatggagaagattcattgatgggacttaaggaatgactagatatgacaggatagggaggtgaagtatgctaggatgatctgtatgataatgtcttacacaagtgaacagaagtccagtttaaataacgaggtttggagggagggagtaaagaagatggatttcatttttcttaggtctaatttaatgtgcttttggtaaaatgtctactaggccaccatgtatatgaatctgaaccttaaaaaggaggtttgagcagataggtgcacagtttttaatcattagcatatttaacagttgaaaccatgagagaatatgccttatgagaagaagacaccaagatcacacaatgctaggaagaccaaaaaggttgtggcagagaggtgggagggttgatcatgagaggaataattaagtactaaattccactgaaaacattaagtaagatgtgggttaaaatagtttattagatttggcaaattggaagttttgataatattcaaaagagcaactttggaggaatggcaaaaaaaaaaaaaattgtaagaatggttatccttcctagaagatggttgcagaaatgattcagaaatagcttgtaagtagagggtaactgaaaagccctgagtgtgcttactagctggtgagagagggtttaaagatgaatatgtgttccttaaatccattttgtgtgtttatgaggacagggtaaatagtctagctaaatcaccacaccctgccctgtgcctagcatagtttctatatatttattaggcaccaaatattttaggtatatatttttttatgtaaaatatatagggaactgtgtgaggccctggaagaaacacaatgtctattttcattgaaaaagagctacattggagagactaaccacccatcactcaatactattttatttagttgtataagtaatgggtgctatggcagtttatgacagacagacctgcccttatcttgggggaaccacagaatgctttacagaggaagccatttttaatgttctactgagagcaaaatagaacttcctcccattcctcacccactgaacacattccacagagttaaaaactctgctttccttccacggtcacttttcttggcattcagaaattattggaaactgtaactatgggttcagtgccaacaacattctaacactcatggttagaatcctaaccagaaagagtacaaataagggtcctttcttttttgattttggctcagatatcgatgttactaataatgataataaaataatagtttaaatttaccctgtctttatgattttcagaatacttcccccttctagtttatttgggatgagatgctagggaatatgagtaggaaaatgataaagtgagacaaagaaggaaggaaagtcaatgaagactacatttcaagagtttaaactgtggtggacaactggcgctcaatttgactggggacttgaagaaaattatgtggaacacacacctcagacttatcctttgaagagatgagaatgctaaggtatttatacaccaactcctgctggtcatctgttggcagatcccgggaggggctgtgcattcactccctagcatttttgatctattgcatgcactccggaagaacagactccagtaggcaaagagatgcaggagctggcaggtggaagttggaacaatgtccactgaaatgcgaaggactcagaggaagagacagggtatcatcagcaccagcctaatggggtttgaatctccattttgccatttactagcagtgtgatctctggcaacttacttatcctctcttggccttcgtttcttcatctgtaaaatggggatcataatagtatctacatcgtaggattgcagtgaggattaaataaattattcatgtaacaattttacagaagagaacatgaaaatttcgaaaagattacttacttgtcaaatatcacacatatgggaagcaggccaaagccttgattcttggccccagcctttttccttatacctactgcccaatgtctgtgttgccttgtatcttcataatttacttcccattttctcattgcttaggtctcattcctgattcttttgtcccatttactctcctctaaacccttgtgattgtccagatgagctttagcttgggtgtctgtgtatcccttctgaatatttcatgcttcggccttgcccagcagcttaaacttacactattaactcccggtcttctctacctcgcatttttcctcttacctatgaggcatcttgacctataatattttcacttccaccagctgagtctatctgtggcacatgattacttgtctgattccttgttctcatggaatccttaggcttctctgatgtattttatcctattggcattcacatcccagtgggcacgaagaatatttaataaaaacattggctttattttagaacggaataaacacatcattctttcctcctaaaaataaaagacatattagttggattgtgtcattactgtagagtgatacaagccagaagatgcagtgacaatatcagaatggtgtgttatctgttaccaaagggaatgggtggtagctgtgtaaccaggtcatcatagtggcatgaccatagccaagtgtacggcaccatagtcaagggcactgaacaggtcattagttgggattgagtcaagagttggaccatttgacatggaacacacattctaaaaatatattaagttggtgcaaaagtaatcacggtttttgccattactttcaatggcaagaaaatgcaattactgttgcaccaatctaatagtaacataaacatcaagcggcttcaacttttgcctaacaagtttatttaaaaggttctaggctagtcatgtttaaaatggaacagctttattgagatataatttatatgccatacaatcatctgtttaaagtatacaactcaatgtttttagtatattcacaggactatgcaaccaaatattgtgttggtattataccaattagagatatgacaaaagctttggaccctctcatgcacatttgtacaaacacaaaagaatttgcatatgataccagaaaattcatggacttctctgaagtccatttatatgcccagaagtactactcgttcagccaaactctatcttaaggcagctattaattctgtttgtacaatccagcagacagataaggttgttgatcgtcttatggactcatggatatcaccttaacgacaacaatatatgtgccaagtctggctcctaaagttttaggattttgtgtttaaaaagggggagaaaagctttagtatgtttcgaatcctaactgacagtgagtgacaaaggtttgaaaaaatatattgcagatgtgtgaacatctggaggctaattgtacatgtttaggtactccataatctcatgaaaacttttgacctagaaatgtcagcgctgttgccctctcaaagagtcatgattctttatcacatcgctttattgtaaaatggaagtacatttagtggcaatatccgtgtgattagctatgtccagtcatcagatttttcttgcgttattatgattattacagattctattacactatgacattgagcataaatcaccagcctccttctcggcacatacaagagtcacttattttctaaaggttaccaaatatactaacttgtttaaacaaacgtacacacacaccttcctatatctgggtaggtacagactcagataaatcttcatacaacagcatgctataatgaaaagaacttaagttttagagtcataaataacttgatttgaatccatgagtatatatttacttactgtataatctagggcatgttatgtaaacacttgagaattcaatgccaaccttgggataacaaattttacccagcaagtctatgagaaagatcatagaaataacgcatgggaagtacttaaaacagtgtcctacacatggatacagatcaagaggtagtaaatacactcacaaaatggtctaattaagaaagtcttccatgagtttatgccctccaaaagatgagattcgaggccaattttgtgtcataaactttatgcttttataatattcatttctattttatgattatataatgcttaaataataatatagtaaatattcatgtaaaattcttacaccgaaagataaatattgttaatatgttggtggtcattaacttctccttctctctgttctttctcctctcttatttatgtgacaatatatgatccttttttctgaggtttaatagtgattcccatgttttcctcttccatagataccataaatctgttgatacacatgttctctttaccatgaaatagatcccttctctgtaccatggcccctataaatcaggatacactacattatgcatctataagaataattctgatatctcagcgactcaaaagaatagaattttcttcccgccaaacttcatgtcactatagattggtaggcgtctcaactcattgtactcagctgaaggacctgggctgagagaagggtcatctcaatataaactttaagaacgcaagagaacatgtgaaagcacacgataacccgtaaagcttctgcttggaaatggcgcacatcacttctgttcacatttaatttgatgaagtaagtcacatggccatatcaaagtacaagtaggcagagtaaaagatactatcaggagcctggaataaaagaatggaactttggtgaatagacttaatggcaaccacatcccttaaaacaagggttctcaaacttgaacatgcatcagaataacctagaggtttgttaaaacagggagtgttgggatccaccccctgagtttctcatcctgtaggtctagagtacagccagagcggttgcacttctcacaaattcccagttgctgttgattctgatgtctgagaaccacactatgagaactgctgccctaaagtataaaagctcttctcttaagattccacaatggaaaacacttcaacagtggtactttcgactgtccatggtcacatttcaaccacatacttctcaagtttccaaatttatctcaatctccaaccactggtctgttaataatttcccaaaattgctgtattatttcttttcctctggtggaatttaattaaaatatctttcctacaaaccttttccaaatcattctaactagaagtattgcctataccttttccatagtagtatacacctttccaaagtgatcacatgctttgtattatggtaatcttacacttgtgtttttctcagtttcatgaactgttttcaagcgcactcatagaaatttacccaaaatgaatactaaaacacttaattttttattcctgattttgccacattagggtaaaagacttggccacatgttctaaatttaaatcactactcttgtctcagaagccatgtgaacagtagggaggacagcataggttctggagctggactgcctgggtcaaaactaaccttgccactttttagctgtgtaaacttgtgcaaatttcttaagatccctgagccttttcctcatctagaaaatgaaagtgagaattgtattcataccataggactgttacaagaattaaatgaattagttgatttgaaacatttagtgcaggacttggcaagttttgagccattataaccattataattgcaaaacatcctgaagttattctctatgcctgaagttacattttcttaatatccattttctccttaatcccttaaaagctgtcttctgcctcatttattctatcaaaactgtattctcaacagtcactaattatattctaattgaatttcagagtgaatttcacacctctccttttgaaagattcatttctatgaatttgggacagcttcctagtatgatattccatctataagtatatccatatcatctatatcgtataccttatctgctctgctaactctttccttgtgttattatggatgttctccaattctgttctgcagacgggtgacaagtgaacatgtagaagaagttttcagtctcctagttttacctccattcaattaactttaaaatctacattactagttctgctgtgtcaccggcagtccaagaaaagaaacctgatcagtttgtgaaaatagctaatatttaatatgagcttattatgtgccagctactttacctggagtttcttatttaagccttacaattgctttattaagggctaggaacttcacatgtacattaaaatgtagaagcaaactgttgaggagagaaaggaatttacccatattatacagataactaataggaagtagagattggatttgaatgaatccaggactgatgtcgaagcccagtgtcttaatgttattttgggatgtctgcatagatttttttttctttataagggagtgatgattttaaaagcaacaagacccaccttaggtaaagtccatcatccaaaaccaaactcagttttattcctgtgcctacgcaaccacattattggatgcctagaaaatgttcaaacttctaaccaagtcactggtaaccctctgtgattttggcttaatcaggtttattcatcagttttgcccatatttcacttgagctctagtctcattaccttaattacagcttcctgtatgtctataggcttttgcttctatagacccaatttatatggtatcaactctatatgaagccgtttttgaatctcctagtaatgctttaattttcctaaaattcctgttatatcaaatcagatttcttttttatttttttgtcagttataagtttattttttgtgagggcaaaaataaatttgttggataatgagtttgtgagtagtagatcaatttgttcacatattttgcaaaagttagagcttattactcattcatgtactattgatgtaacgcattagaagacagttaacattagttcctaattgcacctgaccaaaaggagctgtgggcctggcctatacaccttattgcgtgttcagcatcaactgatttagtgaagcagcaaaaagaaaaatggtgtgtgcagtattatctttctgccacagatacatgtttttaatttccaagtttccaatgcatcattcagttttatctaatgggaatgcagctgagagaagtttgtatcaacccaaaactacatgctaatatagtttagttttcaagacttgtggagtctttttttttaatggaataagatcatcagaaatcctggagcaagacagactggctgtggtctaccagcattgtagtaaaaacattggggaagttttataagacctaattattagaaaataccataaaatagtcattttcatagaaaaagctttcctttctttcctcacactaaatcacattactttgtgttcaaggtaaaatggagtttgaaatctggatgtaaataagaaaagatattattttattccaagtgaaacatgtattcacacttcacgtcttgaagcaccaggtggccatttgggctgagttttcaagaaaaaaaaaattatatagattttatgtccccccccttttgttgttgctgttggtggtggtggtggtgatttttattttttggtaaagataataacatatgaaacaattttcctgttaattaaaacttactctatttatgagcatgatattttaaagaaattttttatatataatgaatatttggatatatatgtggttaatggttattttaacaaacattttggtttgctgaaatttttaagtttttttttcttttattattatactttaagctttagggtacatgtgcacattgtgcaggttagttacatacgtatacatgtgccatgctggtgcgctgcacccactaactcgtcatctagcattagataaatctcccagtgctatccctaccccctccccccaccccaccacagtccccagagtgtggtgttccccttcctgtgtccatgtgttctcattgttcaattcccacctatgagtgagaatatgtggtgtttggttttttgttcttgcgatagtttactgagaatgatgatttccaatttcatccatgtccctacaaaggacatgaactcatcattttttatggccgcatagcattccatggtgtatatgtgccacattttcttaatccactctatcattgttggacatttgggttggttccaagtctttgctatcgtgaataatgccgcaataaacatacgtgtgcatgtgtctttatagcagcatgatttatagtcctatgggtatatacccagtaacgggatggctgggtcaaatgcgatttctagttctagatccctgaggaatggccacactgacttccacaatggttgaactagtttacagtcccaccaacagtgaaaaagtgttcctatttctccacatcctctccagcacctgttgtttcctgactttttaatgatcgccattctaactggtgtgagatggtatctcattgtggttttgatttgcatttctctgatgcccagtgatgatgagcattttttcatgtgtcttttggctgcataaatgtcttcttttgagaattgtctgttcatgtccttcgcccactttttgatggggttgtttgttttttcttgtaaatttgtttgagttcattgtagattctggatattagccctttgtcagatgagtaggttgcaaaaattttctcccattttgtaggttgcctgttcactctgatggtagtttcttttgttgtgcagaagctctttagtttaacgagatcccatttgtcagttctggcttttgttgccattgcttttggtgttttagacatgaagtccttgcccatgcctatgtcctgaatggtaatgcctaggttttcttccagggtttttatggttttaggtctaacgtttaagtttttaatccatgttgaattgatttttgtataaggtgtgaggaagggatccagtttcagctttctacatatggctagccagttttcctagcaccatttattaaatagggaatcctttccccattgcttgtttttctcaggtttgtcaaagatcagatagtggtagatatgcggcgttatttctgagggctctgttctgttccattgatctatatctctgttttggtaccagtaccatgctgttttggttactgcagccttgtagtatagtttgaagtcaggtagtgtgatgcctccagctttgttcttttggcttaggagtgacttggtgatgcgggctcttttttggttccatatcaactttaaagtagttttttccaattctgtgaagaaaggcattggtagcttgatggggatgacattgaatctgtaaattaccttgggcagtatggccattttcacgatattgattcttcctacccatgagcatggaatgttcttccatttgtttgtatcctcttttatttcattgagcagtggtttgtagttctcctcgaagaggtccttcacatcccttgtaagttggattcctaggtattttattctctttgaagcaattgtgaatgggagttcactcatgatttggctctctgcttgtctgttgttggtgtataagaatgcttgtgatttttgtacattgattttgtatcctgagactttgctgaagttccctatcagcttaaggagattttaggctgagacagtggggttttctagatatacaatcatgtcatctgcaaacagggtcaatttgactttctcttttcctaattgaataccctttatttccttctcctgcctaattgccctggccagaacttccaacactatgttgaataggagtggtgagagagggcatccctgtcttgtgccagttttcaaagggaatgcttccagtttttgcccattcagtatgatattggctgtgggtttgtcatagatagctcttattattttgaaatatgtcccgtcaatacctaatttactgagagtttttagcatgaagggttgttgaattttgtcaaaggccttttctgcatctatggagataatcatgtggtttttgtctttggctctgtttatatgctggattacatttattgatttgtgtatattgaaccagccttgcatcccagggatgaagcccacttgatcatggtggataagctttttgatgtgctgctggattcgttttgccagtattttattgaggatttttgcatcagtgttcatcaaggatattggtctaaaattctcttttttggttgtgtctctgccaggctttcgtatcaggatgatgctggcctcataaaatgagttagggaggattccctctttttctattgattggaatagtttcagaaggaatggtaccagttcctccttgtacctctggtcgaattcggctgtgaatccatctggtcctggactctttttggttggtaagctattgattattgccacaatttcagatcctgttattggtctattcagagattcaacttcttcctggtttagtcttgggagagtgtatgtgtgcaggaatttatccatttcttctagattttctagtttatttgcgtagaggtgtttgtagtattctctgatggtagtttgtatttctgtgggatcagtggtgatatcccctttatcattttttattgcatctatttgattcttctctctttttttctttattagtcttgctagcagtctatctattttgttgatcctttcaaaaaaccagctcctggattcattaattttttgaagggttttttgtgtctctatttccttcagttctgctctgattttagttatttcttgtcttctgctagcttttgaatgtgtttgctcttgcttttctagttcttttaattgtgatgttagggtgtcaattttggatctttcctgctttctcttgtgggcatttagtgctataaatttccctctacacactgctttgaatgtgtcccagagattctggtatgttgtgtctttgttctcattggtttcaaagaacatctttatttctgccttcatttcattatgcaccccgtagtcattcaggaggaggttgttcagtttccatgtagttgagcggttttgagtgagattcttaattctgagttctagtttgattgcactgtggtctgagagatagtttgttataatttctgttcttctacatttgctgaggagagctttacttccaagtatgtggtcagttgtggaataggtgtggtgtggtgctgaaaagaatgtatattctgttgatttggggtggagagttctgtagatgtctattaggtccacttggtgcagagctgagttcaattcctgggtatccttgttggctttctgtctcgttgatctgtctaatgttgacagtggggtgttaaagtctcccattattaatgtgtgggagtctaagtctctttgtaggtcactcaggacttgctttatgaatctgggtgctcctttgttgggtgcatatatatttaggatagttagctcttcctgttgaattgattcctttaccattatgtaatggccttctttgtctcttttgatctttgttggtttaaagtctgttttatcagagactaggattgcaacccctgcctttttttgttttccatttgcttggtagatcttcctccatccttttattttgagcctatgtgtgtctctgcacatgagatgggtttcctgaatacagctcactgatgggtcttgactctttatccaagttgccagtctgtgtcttttagttggagcatttagcccatttacatttaaggttaatattgttatgtgtgaatttgatcctgtcattatgatgttagctggtgattttgctcgttagttgatgcagtttcttcctagtctcaatggtctttacattttggcatgattttgcagcggctggtaccggttgttcctttccatgtttagcgcttccttcaggagctcttttagggcaggcctggtggtgacaaaatctctcagcatttgcttgtctgtagagtattttatttctcctttacttatgaagcttagtttgcctggatgtgaaattctgggttgaaaattcttttctttaagaatgttgaatattggcccccactctcttctggcttgtagggtgtctgccgagagatccgctgttagtgtgatgggcttccctttgagggtaacccgacctttctctctggctgcccttaacactttttccttcatttcaactttggtgaatctgacaattatgtgtcttggagttgctcttctcgaggagtatctttgtggcattctctgtatttcctgaatctgaatgttggcctgccttgctagattggggaagttctcctggataatatcctgcagagtgttttccaaattggttccattctccccatcactttcaggtacaccaatcagacgtagatttggtcttttcacatagtcccatatttcttggaggctttgctcatttctttttattctttttcctctaaacttcccttctcggttcatttcattaatttcatcttccatcactgataccctttcttccagttgatcgcatcggctcctgaggcttctgcattcttcacgtacttctctagccttggttttcagctccatcagctcctttaagcacttctctgtaatggttattctacttatacattcttctaaatgtttttcaaagttttcaacttctttgcctttggtttgaatgtcctcccgtagctcagagtaatttgatcgtctgaagccttcttctctcagctcgtcaaagtcatcctctctccagctttgttccgttgctagtgaggaactgtgttcctttggaggaggagaggtgctctgctttttagagtttccagtttttctgctctgtttcttccccatctttgtggttttatctacttttggactttgatgatggtgacgtccagatgggttttttgtgtggatgtcctttctgtttgttagttttccttctaacagacaggaccctcagctgcaggtctgttggagtaccctgccgtgtgaggtgtcagtatgccccttttggggagtgcctcccagttagggtgctcgggggtcaggggtcaggcacccacttgaggaggcagtctgccccttctcagatctccagctgcgtactgggagaaccactgctctcttcaaagctgtcagacagggatatttaaatctgcagaggttactgctgtctttttgtttgtctgtgccctgccctcagaggtggagcctacagaggcaggcaggcctccttgagttgtggtgggctccacccagttcaagcttcccagctgctttgtttacctaatcaagcctaggcaatggcgggtgcccctcccccagccttgctgccaccttgcagtttgatctcagactgctgtgctagcaatcagcgagattccgttggggtaggaccctccgagccagatgcaggatataatctcctggtgtgccgttttttaagcccgtcggaaacacgcagtattcgggtgggtgtgacccgattttccaggtgctgtccgtcacccctttctttgactaggaaagggaactccctgaccccttgcacttcccgagtgaggcaatgcctcaccctgcttcgggtcgcgcacggtgcacgcacccactgagctgcgcccactgtctggcactccctagtgagatgaacctggtacctcagatggaaatgcagaaatcacccgtcttctgcgtcgctcactctgggagctgtagaccggagctgttcctattcggccatcttggctcctcctctcaaatcagatttctgatccaatatttcaagttttaattttcccactggtaggctctattcctactctttttctgctcatggctgaaaattttctgtatctcccatctctttcatatttgaatctattgaatacatagcctccacactcttaataaaatactaatttcatcatgtaacttcattattcaaaatatttagtggctcccactacctatattaaagattccaaactcagtagttactaatatttttcataggctttctagtcctgtcctttcttttagtcttatctcttactactttaagcttattcctagggcaaacatcttactatttccaaaatgtgattcaacgtcattcctattgcctaggaagacactcttctgtcctatggctctctaagtctacttcctgttgaagtactctttttcataaacattcaaattgtttttgtgtcctactttggtgttacctgacatattttaaaactcatggattggatcacatatctatgcatttacttatggcaccattacattttatttattttaagagacaagatattactcttttgcccaggctggagtgcactagcacagtcgtagcttaccacaggcctccaactcctgagtcaagtgatccttctagctcagcctcctgagtaactagaattgcaggtgtacaacacaatgcagaggtacatttaaacaattttttattgttattttgtagagacagggtcttgcttcattgccccggttggtctcaaactcctggcctcaagcgatcctcctgcctcagcctccgaaaatgctgagattaggaatgtgaaccattgtgcctggcccacgttacattttaacagtggggatctgaacactgcagtttcccaaagccaaaaacatgactaactcagctataaatatttaaccaactcttaagtatacctcctggaccatggtcatatagagcagaggctgtgctactatatatgctttagttttgctagtacatttagaaaattgtttattacatagtcagtactatggtgaatggttaagatatgttgaatgccctgctgagacaacgtttttactttgataggaaagtcaaaagaataacacacatatttaattattaaagaaccagaacatgtagttttctgaatttcttagtataaaaagctccttaagagacataagtatacaaatatacacttcttcatctatgatactctattaaatttggcatatttctttttaacaaaaacttacaagggtagaaatctgctgagatgatatatgaaatgtggaaatgttaaagatagattgggggggtggttaagataagacattgaagcatataatactcctcttggagaatcattcagcttgccaagctaccatgaatcagtgtttgaaaagaggcagaagatacatacatagaaaaatcagccaaaatattcattaacatgaaatgtttccaaagctgaagtgctacattaatggttgactttgtgcctcaagactaaatattgggcaatgttagctttccctataataaaacttgccccaaaatatatgttgagtatcccttatccaaaatgcttgggaccagaagtgttttggattttggatattttcagtttggaatatctttattatacatacgagttgagcatccataatctgaaaatctgaaatccgaaatgattcaataaggatttcccttaaaaatgatcgtgtagttactcaaaaaattacagattttgtagcatttcagatttcaaattttcctattagggatgttcaacctgtattgaacttacttgcttacacgtgttgcccgtttgctgtactgtaagctctgtgaaaaaagtatctgctgacttctttgttcataattgcgccctagcaccttttgtggtagttggaaaatggtagacactgagtaaatatttactaaatgagtggataggtaaaagtatttcagtttggcatggcaagatggaaagactaacagtgtttaagtggctatggccaacgtcaggccttcttcagtttaagaactgtggaaagaagaaaattaaacaattaaggaaagataagaataaatccaacaggaagttctcactgaagccaagagattcaaaaaaatacaggaagaagaagaggaagaaaatactattttctatgcattatattcccaaagatatctgccttactgattaatatcaattaataccataactatcacattttctcataggccaaggtgaaatgtctgataagacaagctttgttgctaacacaatttaactcactttagaatattaacatgacatttatgtggtctactcctctctaagctcaaataaagcagctgcgtataaaaagcagccatggattaaatgacttcagcctgctttgtggaaactactgctgttaaacctgctcttgataaactacaaagagtgcctggactccatttatgaaaagacatttgaatatagacctcacatggtgatcatttaaaaatattatattttgcctgtattacaacattgggttgtatttttgtttaaatctctacttcatttacttatgcgtgtaatactgacttgcttcacaaaatgttactctggagtgtctggcaagcttcctaacaagaaatttgaaagcagttttacatgaaaatcacatttttgaattttatatttctagacaagttttagtacaagcagtgtaagagcataagagtagtctatgtcatatgctatttgtcagtctccaatgaagagtaaacatttatcagcttcagtaacaatccctgcctaactgaggagtgtcattttctgaaaatattgattgatagaggccttgcctaaaaaatataaaatgcatgtaatttacacacagctgagaaatacaagctcattttttcctgacaagcagtaatgccctttataaactatggagattaaattacaaaaaaagttaaattaaaaacaaaagtatgatcagagtgatcagagttttgtgtggtacattttctagtaatcatgttttacagcagtctaatttggtaaataaaagtgaattggaatatattttaaaggctaatatgtatatgtgtgtatgtgtatgtatatacatgtatatgtgtgtatatatacatcatagaaacctttatatttaagagaaaatcatcaacaaatacttttaacacatttgttgttatgacgcagtaacatgtatcctaaattaggaaagtcatgtttccggatattttcctaaggaaatattggttctaaaaattcagcataggaacgtcaagtattttattattcactgaagggaccaataatatcaatgcaagcagaggcctgatatagaaaaattaattaaggtgattatagaggtgtaagcaggactctagtaaatgaatttagaaggtggtctagtcagttgcttgaacattaatcagaatttagagttctgctctgttataaactcaatggtctcgtgaaaccatttttatacaagtctcaatgaattcatctctatatagttcttgttccacctactttagtattttttgaggagcaaatgagataatgtgtgcgaacataagacacaatgtgtaatctaagccaatctgggcagattaccttctctagtgcagattagagatatctatgcattcactaactgaatttttgtaccagttggaagtgtttctgaagcagatcttttttttgctagtctattataattattaaagatgatatcatgcctaaaatttgtcacattaaagaagcatcagtatctttgtaacattcacacattgattttacttcaacctagaggaaccatgactgcctttaaccatttgaaaaggtctttatgaatctaccatctccaagatgaatacccacagcctttattattgggctcacttttggtgtcctttatcgtcatggtagtcatagctcctacatctagtaaacgttaggcctagaatttgaattgccttgattctcaaataatatctgaatccatcatcttatatatttataatttctttgaatatgtgataattaattcagggtaattagcacatccaatgtctgtgtgtagaaacattgtgttggaccccataaatatgtataattatcatgtcagtcataaataataaaaaaaacttcccacaaataatttataaacccatgcagtccttataactgctctttccaatattaatttcagacttaaaggtgatctgttaaattttatcttactggtttcgatattattatagctaagacatccatagctgaattttattacaaagagtaaaagctaccctttccaggagagtaaaatattttattataatagctgtatttttatgccttaagatccaagatcattggcaaggtatatttggtggaagcagtccaaatgagagtcacatgaccatcaagtagatataactttaaactgacacaaggccatttgccatcactttttggatagggtgtgctgccacatgtgtgtttttaaaatactatattttagtacagattcaaaattttgtctgtgaatttattatgggagacattgataagctacattgtgaatatgaccttatctatcgaactaataatatgatcaaaagagaaaatgacatttgttcatgggttgatttgctaaccccgcagtgtcataaatagtttatagtagtgtcattgcctccatagaaagttaagattgcgtagattcttcagctgtaataaatttgtaacatatatattggataaaagtatatgagaatgttcaaaacattatttagattaagagatatacctattagaaattgcatatattccaggggaattttttaaatttttgtgggtacatagtttgtatgtgtatatatgtatagaaagagagagacagtacatgagatactttgataaaggcatgcagtaaataataatcacatggagaatggggtatccatccactcaagcatttatcctttgtgttataaacaatccaatgatactgagttattataaaatgtacagttaaattattgagtatagtcaccttgctgtgctcgcaaatactatgttttattctttctaaggaatttttgtacccattaaccaaccccagcttacctccaccccctagtaccctactcagcctttgagttgagatctctctctctctttagctctaataatatttgctttatttatctgggtgctccagtgttgggtgcctaaatatttgcaattgttgtatccttttgctgaattgacccctttctcattatataatgaccttttttgactctttgtttttgtcttgaaatctgttctgtctgaaaaaagtacagccactcctgctgttttttggtttccattggcatggaatatcttttttcatccattttcagcccatgtgtatctttataggcggtcattaaagatgtcaagtattttgtagaatcatagcatgtatataaacacatgcatgcatatacatatatatacctatggactacaatattatagataaaatttcataagtgactatgatccatgatatgagaggcagagaatgctcagcagtgggatccctctctcaagccatactgtcaaatctagtatattgaaatttctggaacacccttatatattagagtctttaccagaaatgctggtacgtttattttaactgttattgcagaaatggctaagaaaacaatgtctagattctaaagcaaggattaggattgtatactttcttctgttgtgttacacagatacaaccaaacaatgactatttattaagtactatctgtggctaaggtgttgtacttgaggctgtgttatttacgcactaagctgttaaagtttatttgatgtttactagagctttctgatgccaagaacacaactctggttttggtagctctcttttttccattgtttaaaaatgctaaagatcatgcaaataattaacatatgataaacattttttaatctcagtaacattgtaaatttataatatgatgagaaaaagagctgaaagattactgatgtaatttataacaggttagtatttttagttcatcattataaacccagaagagaagagctaataaagttattcagttgtgcttatgtaaatcttttggatcttgagacttatttaatgactggatgaagattttaagtgccatgggatatgtgagctacatggttcaactgtacaattggatcactgttcattttatgggctgtgatatacttcacattgggttgatttattgtttcagagtaaaattagctttaacatgttttcttcctaactgaattgtaaatcaattatgttaacagctcctcttggtaagggcctagacaaaatacatatggtcaataaccattttgtgtgaaataagcatataaaaagcagactttagtagactactctagatttgcatagttcctcataaatcaactttatgaaaatgataagaactgaacagaaatttatttgaagaatttgagccataacagccttataaattaggttcacttcacctattttattcacctcgtttagtttcagcaaaaaagtctgatttaatttagagtttattattacttttgattttaaatgcacaattcttaattgtatatttatacattccagttggaccaattttttgaaaggatttcctcaagaagtagaattgcaccatttaaatgtattatatttgacttgtcaactgtcgaatctaattgtcatcatttgaaatacaacaatatgtgctaattattttagttttagtttttattcttttactggatgtacttaaggcaaccttgtccaactcacagcccatgggctacatgtggcccaggacagctttgaatgcagcctaactgtaattcacccactttcttaaaacattatgagatttttttgcaggtttttttttttagttgattagctattgttagtgttagtgtattttaggtgtggcctaagataattattcttcaaatggagcctaaggaagccaaaagattacatacccctgatttaaggggtacaagatgttacgatatacatagacataatgaaatgattactgaattcaaccaaattatcctatccattatcttccataataactgttttggtatggtaagaatacctaaagtctcttttcttagctaatgttcagtgtacaatacaatgccattaactgtagtcatcatactaagcagttatcgagatttatttatccaatataacttcaagtttgtgtcctttgacctacttctcctcatttcttccaaacatttaaagagtaatttataccatttgttcttaaaatcttctaaataatagaagaggaaatacctccaaagccatttatgacttcagcatcaccctaaatacgaaagtcaaacagacaccgcaagagaagaaaatatatatatgccaatatctaggaggaatatagatgtgaaagtcctcaataaagtattagcaagacaaataacacattggattataaaccgtgaccaggtgggtttagccctaggacacaaggttggtttaacatacacaaatcaatcaatgcgacatactacattaacagaaagatgaaaaaccacatgattatctcaatacatgcagaaaaagcatttgataaagctaaacatccttttattattataactcttcgcaaaatatgtatggaaggaaatttcctcaacatcaaggctatttatgaaaagcctatagctaatatgatcaacggtggttgtggggtggttgtactgaaagctttccccttaagatttgctaaaaagcaaggatgcccactcttaccacttccatttgtcatagtaccaaaaatactagcaggagcagtgagacaaaattaataaaaggctttcacatctgaaaggaagaagtaatattatttctgtttgcaaatggtatgatcgtatatgtagaaacccctaaggactccacaagaaaaatgttagaactaataaatgagttcagtaagtagtggaatacaaaatcaacataaaattagttgcatttttatgcaaaagatatccaaaaaattttaaaaaattctatttatgataacatagaataaaatatttaagacccaatttaaagaagaaagtgaaaaatacgtacaaccaaaactataaaacattgaggaacaaattaaaaggtaaatatatgggaaaatatcccatgtttgtagactggaagaagtaatattgttaaaatttccatactacccaaatggatatatagctgtcccttggtatccacgggacatgggttccaggatgccagtggataccaaaatccaaagatgcttaaatcccttatacaaaatggcatagtatttgcatatacctatgcacacccccctatatactttaaaacatctatcgattatttgttattacacctaatacaatgtaaatgctatagaaatagttgttaccatatattatttttacttgtattaatattttttgttgttgtattgagttttttgttctatttttgattatttctggtctacagttgcatccgtggaaatagaaggttgactgtacaaatttaatgtaatccctgtgaaaatctaaatggcattttttttcacagaaataaaagagcattataaaacttacatgaaatcccaaatagccagaacaatcttgaggaaaaaaaagttggaaatactgctctttggatttgaaattatatcataaatctacagtattaaaaagagtattgtaatgccataaaaacagacacataaactgatggaacagaatagagatctcacaaataaacctaagcctatataatcaactaattttggacaggaccaccaagaagatatgtggggaaaggacagtctcttcaataaatggtgttgtaaattgtacccttgtcttatactgtacacaaaaattaagtgaaaatggactaaagacttaaatataagacctaaaatcataagactcctagaagaaaacagagaggaaaaagctctctgacagtcgcctttgcaaggattttttgaatatcacatcaaaatttcaggcaagaaaacaaaaataaactagtggaactacattaatctaaaaagcttctggaaagcaaaagaaaaacacagcctacagattatgagtagatatttgcaaaacatatatctgataagggtttaatatccaaaatatataaggaacttgcacaattccatagtgacaaactaaataacccaattaaaaaattgggaaagaacttgaacattttttttttcaaagaagatgtgcaaacggccaacagggaaattaaaacgtgctcaatatcactattagggaaatgcaaatcaaaatcataataaggtattacttcatacctgttaggatgagtattatctaaaagatgagataacaagtgccagtaaaggcaaggaggaaagggaaccctgacatactgctggtgtcggtgtaaattagagcagacattatggaaaattgtctgggagtgtttcctcaaaaagttaaaaatagaactaccatatgacccaacaatcccactcctgggtatagacccacagaaaatgaaatcagaaccttgtggagatagccttactctcatgttcattgcgttatgattcataatagccaagatatgaaaataacctgagtgtccactgacagataaagaaattgtgacacacacacacacacacacaaatattcagcctcacaaaagatagtgccatttgtaacaacataggtgagcctgaaggaaattacactaagtgaaataagcaagacacagaaaaaaatatgctacgttatctaacatctgaaatctgaagaaaatgtataagttgaatacatagacagtagaatggtgattaccaggagtagtgagggtgaggaaataagtcaatgtgtacatggaaacttgcagttatgtgggataaataaatttagagtttcgatatacagctaacccttttttaaaaaaatataaaagcagataataatggggtaaaatgtagtgttttgatctatgcatacattatgagaaagatttgatctagctagttaaaatgtctatcgcctcagctacttaaccctttctaatatttatctaaaatatgtcagatccagagatgtatgaccagattttaacatcatttttaatgtagaattgacagttgtaacaatgattttctcagtttgcttattcaacacccatggaccaagataataaatttaggacctatttaagtagtttctaaaaaggcgttaaaaaaatccccatgggggcaaacaatgtgaatcgaataacatttccaaatgaatgtaatttgctcatttggatgtgagctaagtaaaaaaacgattgtaaaagaaaatgtaagtaatagaaattatctaagaagagcaatgagatgtgttccatctgtgaccaattttggtcaattttttcacaggcatttaatgggtgcaaaatgagccagtcttggtattagaccgttaaaatgcattgtcttctaggagttcatattgtttcccctcccattctgaaaaaaattagaaaaggtaacaacaataaagaattgtggtagacaaaaactcttttgtaaggtatgatttgactcgtataataggtgttacgagtgttgagtggctctgtcagatagaaacagtcaaagaaatgctagtaatgttgtcttgtttgctttacttgtaagtatcttgtgtattttatttacttaatatatttaatttactttaatattaaaacgtgtgtgtgtgtatatatatatatatatatgaatgaatgaattctaatgggtcaggtcatatagtatgtgtgtgcacgtgtgcacatgcaagctgggataacaacgtattatatgatagagtctatctggtgataaacgttcagaggttggaaaagggcattgtgtaccaagctcttgaggtattctgggaaataactgcacaccaagcatttggatattgactgactgataacagtaaatgtacatttattcagctaaataaatgaaaaaaaaagtatcaggcattccaagcagtgaaaataacttaaataagaacacaaaagtaagtctacatttaatatgctcaaagcatcatgtgcatctgtacaatatccaaaatatttccaccagaattaaattttgttattccattattttactataatatttggaggcaaatgcatattaacataatcagtttaaactttgcaatactaaggtttctcttttatttagtacaatgacccaaagttatagaattatttgcctctgatttcttggcaacatatgtatactttactgaaaatttcatctacttcattcttcatcaccctacactcacacagagaaacaaattgataatgagaaattgaaaaggaatatgaaagctcagtgctgatttttatttggttcatgtaaacctctagaagcttagctctattaagattatctgaacctttgtaatactttctatttgaagctatttgcttccaaccagtctatcttatattaattattattttcaattcatcagattatgtggatgcaatggctgataagttgagatatactttgaggaacactgctatgataatcatgatagaggatgcatgggtgattcatagtatttccaactatgtccagttatgtttagtgtttgtgaatcacctatttgcctaccttctctagttgagtaactatatatgtaggtaattgaatcagactattttgctaccaagaatatagcctcttccccgatataaagaggcaccaattacagattatttacctaatggagcattttaaatatggaaggttattaactatttacacttgagtcaacattggaataaaaagttttagctgacaaaattatttgctaagtgtgtacttccatccacatttgccatatattttaaagagcaataaggaaagtcttttaaagtgatgaaattcagggctttcatttaattgatgtttttatgtgacatatttatattaataataaaatgcaaaacagtgaacaggtaatatttaatctttgttcttccttttcttaaagtcaggaagccagaactagtcagtcctatcagtaaaagcaaaagtaatatatccaatgacatttgcttaaatacattaccaagtcctgagaaaggttcttactaatctgggaataaatgtccttatcttgatatgtgtattagtccgttctcacattgctataaacaactacctgtgactgggtaatttataaagaaaagaggcttaattgacttgcagttccacaggctgtatgggaagcatggctggggaggtctcaggaaatcactgtggaaggtgaaggggaagtaggcacggcttacatggccagagaaggaggaagagagagcaggcagagatgctacacgctttcacacaaccagatatcatgagaactcactatcattggaacagtaagagggaaatctgcccctatgattcagtcacctcccaccaggcgcctcattcaatattggggatcacaatacaacatgagatttgggcagggacacagtgccaaactatatcgttctgccccaacccctcccaaatctcatattgttctcacatttcaaaatacaatcatgctttcccaacagttccccaaagtcttaactcattccagtattagttcaaaagtccacagtccaaagtctcatctgagactaaggcaagtcccttcaacctatgatcctgtaaaatcaaaatgagttacttccaagatacaatgagggtacaggcattagctcaaaagagttaaatcgatcagaagaaaggggttacaggccctgtgcaagtccaaaacccagcagggtagtcattaaatcttaaagctccaaaataatttcctttgactccacatctcatccaagccacagtgatgcaagggacaggctcccaaggccttgggcatctccatccctgtggctcagcagggtgtacagcacccttagttgttttcatgggctggcattgagtgactggggcttttccaggtgtatggtgcaaactgtcactggagagaccattctaggctctggaggacagtggccctcttctcaaagctcaagtaggcagtgccccagtggggactctgtgtgagagctctaaccccacattacccttctgcactgccctagtagaggttctctatgcaggctcccccgctgcagcagacttctacctggacatgcaggtgtttccacacattctctgaaatctaggtggatgctctcaagcctcaactctcacactctgcacacttgcaggattaacaccacatggaagccaccaatgcttatggcttgcaccctctgaagcaacaccccaagacacatctggggcctttttagtaacagctggagctggagtgtctgggacatagggagcagtgtcttgaggttgtgcagagcagtgaggccctaggcctggcctccgaaatcatttttccttcctagacctccagacctgtgataggaggggctgctgcaaagggttctgaaatgcctttgggcattttcccctttgtcttggttattaacattcagttcctttttacttatgcaaatttccgcagacagcttgaatttcccccaccaccccgagaaaataggcttttgttttctaccacatggtcaggctgcaaattttctaaacttttatgctctgcttcccttttaaatataagttccagtttcagataatctctttgctcatacatatgaccgtatactgttagaagaagccaggtcacatcttaaatgttttgctggttagaaatttcttctaccatataccctaaatcatcagtctcaagttaaaagttccacacatacctagagcaggggcacaatgctgccaatctctttttgttaaagcattgcgagagtgacctttattgcagttcccaataagttcctcatcttcatctgagaccacctcagcctggatctcattgtccatatcaatatcagcattttggtccaagcagttcaagtctctaggaagttacaaactttccctcatcttcctgtcttctgagcgctccacactgttccaacgtgtgcttcttactctgttccaaagttagttccacgttctcatgtatcttcgtagcagtgccctacctctcggtaccaattttctgtattagtcctttctcgcattgctataaactacctgagattgagtaatttgtaaagataagaggtttacttaactcaaagttcttcaggctgtacaggaagtatggctggggatacctcaggaaatttccaccttcttgtggaaggcgaaggggaagcaggcacatcttataccttacatggccagagaaggaggagaaagcagggggcagtactacacacttttaaacaaccagatctcatgagaactcattatcatgagaacagcaactgggaaattcaccctcatgatcctatcatctcccaccaggcccctcctccaacactggggaacacaactcaacatgagatttgggcaaggaaacaaatccaaatcatatcaatatgctagaatgactcaaacaataaatacgacaagaatattcctcctctgtattgacgctgttcagtatttttctggagaacctagccaatattatatgacgagagaaagttacatgaaatatatattggaaagcacaagataaattatttgaaaataatatgattttctcattatgtaaaatgatctcaaaattaggaaatgtacagtggtaataaaatgatactcagcatagttactttttgtttttcagtttccacaaacaagtgagatcatgcaatatttttctttctgtgtcttgcttatttcacttagcctaatgttcttcggctccatctgtcctgtggcaaataagaagatctcctttttttgtgtttctgttttgagatgaagtctcactctgccactcaagctggagtgcagtggctcactgcaacctccacctccccggttcaagtgattatcctacctcagcctcccaagtagctgggatttacaggcgcccaccaccacacccagctaatttttgcatttttagtagagatggggtttcaccatgttggccagggtctcaaactcctgacctcaggtgatctgcgtatctgcctgccatggcctccctaagtccctaagtgctaggattataggcataagccaccacacctggtcaagatctccttttttttttttttttttttttttttgatggaatctctgtcaccaggctgatgtgcagtggcacaatctcggctcactgcaacctccacttcctggctttaagagattctcctgcctcagcctcctgaatagctgggattacaggcgcacaccaccaagccaaactaatttttgaatttttagtagtgattggcttttaccatgttggccaggatggtctcaatctcttgaccttgtgatcctcctgccttggcctcccaaagtgctgggattacaggcatgagccaccacgcctggcccaagatctcctttttaaaggccaagtaatattccattgtgtataactatatagagagaataaaacagtggttaccaggttgggggtggaaggaggaaatggggagatgtaggtcaaagtctataaagtagcaaatatgtgggataaacaagttgaaagatctaatataaaacatgaggattatagttaatagtgtgttgtattcagaatttttactaaatgagtagattatagcttctcgtggtcagagggtgggggaacgattatgtgagatgatggatatgttaatttctttcattatggtttcattatggtaaccatttacatgtgtatcttatagcatcatgtgtataccttaaaacacacaataaaattatttttaaaaaagagaagttccaaaatctatgtagttttcttagaagtaaaccgcacaagaaagtataagcttttttttataggaagtttaaagttgtatataagtacataaataaagacatgaggaaaggaagtcacatatgatgaaaatgctagttctccctaagttagtttgtacattgaaagtaacttcagtcacactcgcatgttcactggagcactatgcgtaatagcaaaatcgtggaatcaagttgtgtccatgagtagataaagataatgtggtgtgtatatataatggaatactaacgagccacaaaggaataaaattatgtcttttgcagcaacatggatgaaactggaggctatcatcctaagtgaaataagtcagaaacagaaaatcaaatactgtattttcctataagtggtaactaatcaatgggtacacatggacatacagaattgaatactcaacattggagactccaaaagatgggagagtgggaagggggtgagagatgaaaaattacctattaggtacattgtagactatttgtgtgatgggtacactaaaagccgagacttgatcactacacaacatatccatgtaacaaaattgcacttgtaccccttaaatctaaagttcctgaagttacttcaatcaagatctagatggtccctgacttaagatggtttgactaatgatttttcaactttatgatggtgtgaaagcagtgtgcgttcagtagaaaccgtactttgagtacccatttaatcatgccatttttcactgtcactactgtgctcaatgcattacacgatatattcagtactttagtttttatagaacaggctttgtgttagatggttttgccaaagtataggctaatgtaagtgttcttgcatgtttaaggaaggctaggctaagctataatatttgacaggttcagtgtattaaatgcaattttgactcactatattttctatggacaatgggtttattggaatgtaaccctgtcataagtcgaggagcatctgtataattacacactcacatgcccacaaacatgtatgtatgcgactctctgtgtatctatatttgtattattttagaggatataacagaaccctagcaataaatagaatttatctcagatggtaaaatgaagataattgtattttaaaagttacagaagtatatattaacaaataggtgacaagaaataatctagagaggagcaatagtaggaagtagttactatttctactattcctactatatagtagctgaaaggaaagggggaacggagttcagtgaaagctgcaccaatggagggaatgtagttgttggtagaactcagatactacattatgcagctctggagcagggaaataatagagaaatttccccagctttctctttccctcttctttcaatctccagctggtacttcccaccagcttaatgcaactggaatctagccagctaatgatcacaggagatacagtgtgaaagggtcagccacttagagaataagcagagaagaaagggtgtttatgttcagggtgagcacactgaacataaatcacatgaatggtaagagggattcagttttctagataattctaaaatttgtttaaatgtaaatgcgtgagtacagttaagaaattattttcaaacaggtgatttgctttagtagattttataacatacttaacatagtatgacatgatagagaaataatttaatggtgtggaatagatattttgacaacattcccttttatttaggtaaatttagtacacaattagggtgacatttcatgtctctagagatagaataggttagctaataaagccttcaactgtggaaacccaaggcacaacaaatactaagataactttcagataatgattgaatgtgaataaacatttaaatactttattacaatgtagaagaatattacaataatattaaggtgatataaaacctagaggctgtaaaataccgacaaatttaccaacacaaaattaaaatattttccattgtgaaagaccattaaacagtaataaaacctatgatggactgcagaatgacactagtaataaaaaatcaataacctcagtatgataacactcctacaatgaatatacaaagtataatattttaaaagtggctacatattatggtcaggacattcacttgggaaaattagaaatagcccatcaaaataaaattaagcttaactaataaataaatgcatagtacaaatatcttcttattatgagggttcatgtaaataggccctgtgtttcttttggaggaaacacaacttgtaatattttaatcagacaatttagtattatctttcaaaatatgtaattttacatatatttgatcctgaggtttcacatttaagaattagatatatagtaatactcatacatatctacgacaaatgtgtaaggatgttcattgcagcgttgtacacagtagctccagtatttttcatgctatggactgttaggcagatatatctctaccattggactataggcaccataaaatcagggtctaggtttgtttgtgtttgtttttatttttgctcactatttcagctgcagtgtccagcataatcctcgacttatggcaagtgtccaataaatagttacagaataaataaatggataaatgaatacatgcattactgaaattaattttgaagttcacattgtatatatacatgtgtatatacattttaaacttgaaatttgctgaaaacatactttatgccaggcattgctctaaatgccttacttgcacttaccttcttggaaaagtctttgcctcattttaccaatgagggtatgaagaaatgaagaaattaagtttcttatccaaattcataataccagtgagtggtaaagctaaattttgaatctttactaattgagcacatcttaagaaagtacatgcatagacagtgtatatgtttaatctcattagacaggcagatgagtatgataaatggatagctaaaagaatggctgaatggatagatgcatggatgtatggatgacatagcatctggtgacaagtattacttctagctaatgggactgtggtgctgtagagatatggggtactttcactattaactttaaatgcgtctgtactgttttagttttccactacaataagcatgtatggcttttgtaataaaatgtttaaaagtgagagattaaatccagacttatgaaattaaaatatcaaagacaactaacggttgaactcttggggccaaaaccgtcaatgggatgtgttttctctgagggaaagctttcctaatcaaggggcacgttcccattgagataagagtggaaatgacccatctggtcaatccaagatcagagcccatatggggactggagctatgataaggagtcaggctccataggatatagtaattgagatagttataccaagcccctgggtttctggtcatcaggaaagacaggcccctgctagtagagctctacctgagggagaggtatttgagagaggccgacatttcagagtcaagaagaactggaagctataccaagaaaatgggttatgtggtatttagcatatcagttttaaccctcatccagccactgagaaaaggaaagaagaaattttaaaattgcaaatggacaaaaggaacattcagtaattaaaatagcagtaagattctacgcaaagcctttccttttctctatttagtctttgaagttgctaatatctagtcaaagggagttgctttccaaatatgtaatgtttgcatgcatattatagttatatattagtgatcatattgtttataaatgtgtgtataccatcctaggtttttgtttctttattgaatccctttctcatatatctgagcttaaaaagcattttttacaattatcattatttggtagaatcctacccaccgctgactcatagttttagtgagatgacaaggaattcacacacttgaatctttcaaacccccaggtatgcagacgcttagcacaaaatttttggaagctatgcttccaaagttctaaggagtctgcttttcctatcctcagtctgagagcacttgagtacatttttttttctgtagatatcagtcaatattatttttgaaaatacgtttttgtaaagcacggtgctattttgtagtgtgtatgccaaagtttagaacaatgaataaaacattagttttcctgtgtcttgagtattttcaatctgaatttaaaatgtactaactttgtcatcatcactcataggcttcttgattaacctgctaatgctctctaatttggaaattaatgcttctttccctatcacttaaaaataatctgatacagtttctagagcatgagatgttcttcaaatcaagtcttatttttggaaatgtgatcaataagaaaaacttcttgcaatacaataggaagctgaggtgcattatgcttaactttatccaaggtcacaaaatgaaagaactgggagccaaaccaaggactctacttttttttttccactttaatcagactgtcacttattggttgtatgaccttgggctgtattcttaactcacaagagagtggtgaatttaaatgaaaaaaaaacataataaaagttcttgtatataattgatacttgataaaaactaattctataccaaactgaatctcttttgcagaattttgtagggagaaaaatacaggctgctcctgttccttgctatgtgctttctgccccttcaagcagtgctcaattttcaacatgtgtcttactctacattcagggggtgtagaccatgaaaatgaacctttattcccaaaaggttctctctccattcatttactgatttaacaaatactgagtacctactacttctcagtcattggtaaaacaatctaaaggaagttcctgcctttgtggtttttatattcttatataaaaaataaacataataatgacagtttgtgacaagcaatgtaaaggaaatcaatgtaaaataaagggaaaggggttgggcttctttaaatgggataggaaatgcatctctgaagaggtgccatatgagttaagacctaatgggtgagaatgaatcaaaaatgcaaaaagagaaattattttaggtaaaagagcaccaaatatgaagatcaagaggtgtaaaatggccttcggtatttgagatgcaaaaacaaaacaagaccaatgtgtgaaagagaaagagggatgacattagagtgcttttagctaagtgtgaaggattgggtcatgctgtactttacaggcatggaaggcagtgtcttttaacacatacatcaaattctattcactattcaaaaaatatactttagtatatacattttaatgaaaatcaatctcagctatgttttacgcattcttaacatcatttattacattctcttttataaagttatcccttatcatcatcatatttgtgttacatggttttggatgcttactctctttttcacttgtacctttctccatcaatgcttcacatttgattatcttcacttctgtaaatttctaaattgcatttttttcacattggaaattacttgacatccatggatattattgtatttgtagttgggaggtcctaattacaatggtggaagccagaaactccaaactcaaatgaaatttcataagtactgtcaaaaggaaaatgtatctttgtaatttgaaaatgggttaaagtttgctacttcttgattgggtgtgtttcatcagcatgcctccagtagtgcttagaaaatacacaaatgcgtgatgttcgtccactggtttcagttttcagttagagtactactgaaaactttggattagttcaggaaaacttaattcgccatcagttattttgtcagttgttgaagtttgtgtgtgatggtgttttgctcaacactgaaccccttattctgatgttgcgtatgacatatgataccaccatgacaccatcccacataaatgttttgtgctgagagagtcacatcagtgttgtatgccatctggtttgtccaatggtccactcgtttcttccttaggaattaggaaatggagccattctaattataaaacgtgattaattgcttggtgaattggtatcatgtctgacacatggtaggcattccacaaatacttaatgaaggcatgaatgcaagcaaacctatgaattacaattatgtgccaattggaaggaaatcaggaaaaataatagatcgtatatattgagcatttactttgcattcattttctctgttaacatcatccctaattatttgcaagatactaatatgactcattttatagataaaaactgggacagggaaattagtgaattttaccacagtcccttacctattagtgatagggtcaggatttgatcaaggtatttttgcctcaacaggctaagctcttttatatgtagtgggtccatttttaccatatttttttcaaaaaaaaaaaaacctgatcattttgtacaatatctgcgttaagctagtcatcattgagtaatttgccccaggactgcccttataccatcaggcatattttgaaatcccaaaatataccagaaagaataataaccaattaaatttatgtcacatgaaataaacatctttattctggcctcactgtgtatcaagtataacttctaacactgtaaacaattaaggttcacaaatagactattttatgttagcgaggaagataaggggtggagttacttctgaaactgactatactttttctagcagcagaggaaagaaaaagtcaatttggttaggtcaaaagcaaagcacgaaaaccgcaggtgacaatcacttaagcagagttaaatgtcactgagtcaaaatactttcatctcaaatgtaaaccctaatagttcttcccacaacaggcatgtcgagagaattgtaagaaagtacagatgtttttctatctgtagtctcccatgctgactgagtagcttccatttgttatgtcaagttagtgtctgttctcctgggtttagaagttacataccaaatatttgttctaaggatttaaatagtcaaggatgtatttttcaaataaaatatatttaacatatgtaaacttaggacaattgtgacggaagagacaattttgaaaatttcctgcatttggaaattgaaaatttaaagatagaacttttcctgttgattagggcacacggcagaaatttgatttttgaaaaacttttcaactgaaacacgtcttatttaaaactcctaaagtcacagttggttgcgaattttcatttaactgacttttccccaccagcttctgtgcatttgctctgaggcactctcaggatgtttggtattaacactgcagagcttccattctgatttaatttccaaaaactatcccagcgaagagggcttttatggaaggcaattcaatgaagcagggatacagtggcaagtggtaaactgagaattttgaaattatttattcgtaacttcctttcccattacagtcattctttcatgagaacatatctctgggatcatttatttaccattgtattattaaagtctaaaatatagcctggcacaaagtaactcaataaacgtttgtggagtatatttttctgtgtctcatattttcaatatagatttttttttaccccctccgagacggagtcttgctctgtttcccaggctggagtacagtggcgtgatctcggctcaccgtcatctctgcctcccgggttcaagcaattctcctgcctcagcctcccgagtaggtgggattacaggcatgcaccaccatacccggctgatttttgtatttttaatagagacggggtttcaccatcttggccaggctggtctctgaactcctgacctcaggtgatccgcccacctcagcctcccaaagtgctcggattacaggcatgagccaccatgcccagccatagtttttacaatcactatcattacttccagctaccattatttactggattggctgcatgataagttccatttgtattggtaggtttaggatttattgattaacagaacgctcaaatagttttcagtgtatcagtcttctaaaagcatctgattttccttttttccctgttatgctctaggcaagcattatgcattttgagccactgtttttttcttttttaattttttgtttgtttgttttttgagatggagtctcactctctcacccagggtggagtgcagtggcccgatctcagcttgctgcaacctcctcctccctggttcaagcgattctctaacctcagcctcccgaatagctgggatcacctgggattagaggcgtgtatcaccatgcccagctaatttttacattttttttttattattatactttaagttttagggtacatgtgcacaacgtgcaggtttgttacatatgtatacatgtgccatgttggtgtgctgcacccattaactcgtcatttcgcattaggtatatctcctaatgctatccctcccccctccccactccccccaccccacaacaggccccggtgtgtgatgttccccttcctgtgtccaagtgttctcttttttcagttcccacctctgagtgagaacatgcagtgtttggttttttgtccttgtgatagtttgctgagaatgatggtttccagcttcatccatgtccctacaaaggacatgaactcatccttttttatgactgcatagtattccatggtgcatatatgccacattttcttaatccagtctatcattgttggacatttgggttggttccaagtctttgctattgtgaatagtgctgcagtaaacatacgtgtgcatgtgtctttatagcagcatgatttatagtcctttgggtatatacccagtaatgggatggctggctcaaatggtatttctagttctagatccctgagacatttattcagccaaaaaacacatgaaaaaatgctcatcatcactggccatcagagaaatgcaaatcaaaaccacaatgagataccatctcacaccagttagaatggcgatcattaaaaagtcaggaaacaacaggtgccggagaggatgtggagaaatttttatatttttagttgagacggcttttcaccgtgttggccaggctggtgtcaaattcctaacctcaggcgatgcacctgcctcgtcctcccgaagtgctgggattacaggcatgagctaaagcgcccagcctgagccactgttttctacttgtaacaagatgatggtgatagttttctgctagttacaccataagcatgttgaaaagcgtaatggaaagtgcaaaagataaaattgttttgtgtttctcctggataaatataggccattactttttatcgttattaattttatgatgaaattcaatcatcttcatcaacgcaaattatttccattatgacattttaccgtcctttaatgagaagcattgttactaaatggtaaaagcaactgcttgtatcagtgaatgaagtgctaaaaatggattaattaaggagtacttaatttagctaaggcagaacatatcttgcagaatgttaaaaaatttaacatgggaggagttgtgcaaattttaattaaaatgttgtatatctattgtatatagtgacttgtaagtagagaatacatgtatgtacaatgcagtcagtgctgaatgccaaatacaaaatattaaaaataacaatatcatgctttaatgaattagtccattgccatgatatggtctacaacttagaaactccagcatttagatatcagatgatattataacataaatctcttcgtatgcaagcctcaaaaaataatccactttacttccagcactttgtccttttagaatatcacatcaatgaattaggttattgtttacaaccataggttttggttgtgccaacatataggcctttctgttttcatattttgagcattctggctatggctagtttatgaccagaagtgccttctttccagtttctctattccttttcttctcagtgaatttatttatttttgtttcctaatacaaaccctgtggggaggttgatgctcatcatggtttctaaatgacatcctctcacagtttttgttgtttaataaaactcttaaaagactgaccaactaaagctttgtgagtgcacatttatacctgctatctttgaaatcttgcttgttttcaattacacatgctatgcattataattctgtatttccattcctgcctgtcccttggcagaaacttggcctgaaatttagacagtagagcctcttctttagatttcccagcggtgtttgaaggttacacccagcgactggctaatcggacttccctgaggttgactgcccaagattagttttgttgaaggcactgctttcatcttacttactcacattgactttcttggggtgagggcatgttgaaagcaaactttgtgcgatacttggtcttcaaatacactgagatagtatctgagagaatgaggttaaggtaccatggcagtgtagtgcaatgactggtttctaatctgattttgactagcctttgaatttgccttcagaccgccatgaggttcaacttctttattcgaaaaatgatcaaatttcgctaaatgatttatttgttccatagtatcctcaaatatgaaacactcatcagaaacggtgttattgttcataaagtaaaatctctagcagtattgtgagttctcactattttcattctgagacggcttcaaagattggataagcaattattaaaatctggtgtccgtgagcattttatgtagtagagtcttggtgtaaaattacgttcatgtaattgttaagttcttactttggggattcagccactgctctcatttcataaaatcttaatgtcgtgtaataagaagtataaattacatcccatcattttcatactcctcaaatactttatagtactcattatcataccattgcctttagtcactgtcttacataattctcatcaatttctatgactttaactgtcctctgtattgagtttcttaacaaatacttaggtgatcacagagtgccaggaattggccttagtgcagtcatcataaatgaggattaccccgaagtccataacatttattttgatttcccataaaaagtaatgtttataattatggggtggctcatctgctatatactcataatctaacatagtctaagtatattctatagcacatgacaatcacttagcacatatggaataagtgataaatgctttttccttctaagtaaattcttctggcttcctgttaatagtatacaaatggtctcctacaactaggtttgtttttgtgttaatgatagaaacagcaaaaatatgacaaaaatgacaaaaaaatgcaacatagtaatggtattaaggttcaacaaactttacagttttactaaacattggatttgggcttcataacatcttaaataagagggaatgctcctggtcaaccacagtctctgaaaggagcgtattcttaggttttgcggggggagtcagaagtccagcaatctaagaacatttcagattgggaataggatgatgatagctttagaagcgtggtaactcaggtgagaccattgttaattagtttgagaattatcttcattgaagtgaatccactctggcaaagtttcagaagggagtgtttgctgctggttggctgggggaagcatgataagaatcatggaggaactaattgttaaatgaataaatagggtagattgaaacttttgttggtgtctacttgttaccatggctgcagaacaatcagtgtcctctttcgtcctcttcctcctttgttttattgtcagtttattaatctttatatcctaaggctgtagcacataactttgtatataggcatttccaaagactgtggagtaaatgatttgaaaattgaatgaagtcatttttgatccatcttagaatttttgtcattcattgacttgttttcatttcccccgtacacagttgtaccttagatcttgaacactttatatctggattatggtcctagcctcctatttctctcaagttttcctccagcaatccattctgtacttaaagaatttactttaataaaattttgatggtgtcaccctctcattgaaaagtatttactctctagtctattgaatgaaggccaggttttctagtttgctgttgatgatccctcagttttctatgtacaatctaccagtttcatcttagttttcactactctactctctctaagacacacaaagccactgttgccaagacatcgctaatgtgtccctacctctgcatgtttattctacatattcccactgccccgaatactcttccccattccctcatttccagctattgaaatcctatgcataattaattcagtttcctatttaaagagaattgccttatcctccaatattatatgattttaaaaatctgaacatgttaaacaactggttgtgccaattagaggaacacattttaaattctgttcagcaatgcaattactttgtacttctattatttactttcttattccaaattagaagcagaattcatgaattttctatctttcaaatttcctggataatccattaaaatactttgaatataatagatttcttgaaaatgtatgttgatgaaattcaaaatattttagaagacctaaattcctttcttcaaaaattacttatttctacctactggcagttttgaattccacataatctcagaagtgggatagtaatagtttggggcaaaatggcaatagtttggttaaataagtgcatatttattgtaatgactgatatttatgaacagctgcatttagtccacatgttttatgtaaatgaaatttattacaatgtttgaaattttttggggggcaataaaaataatgcttggccaatttttcaccattttttactttttataatggcatatatttgagaccaaacatacatgcatgtgtctatgtataacacagcagtgaataggcacaggctcaaccctttttgttttctcacatcatggttttatttaatatactaaaaatgaaagagctctaagttatgctaatcacaggtacagctgactagttactagtgagaaggaagaacattttctagaatttcaagatacggtgaagtatagtatctactatataagaaacaattggtcaaatattttgaaaaacaattatcaaatgaattggagatttctaggcttcagaattccaaagctaagtttgtaagattattaaggaaggcagtgttcatgcacaaaatattatttagttcttctttaaaaagtacttgcaaaaattactttgaccatctgttgattaataattaaagtgtaataagttgagccatatgtgttgtataactttgtacctttcagccttgtgcattgaaatgtctaatatcatttgaataaatgaataaaacaataaaacgggagatgatgtaacagtctgcttataagtaatgtttttggcccttattcaaaatgtagcagactagcagtttcagcatcacttgggagactattgcaaatgcagagctccaggctctaccccgatctattgaatcagattctgtagttttaaaagatccccaggtgattcatatgtacattaagaattgagaagcactgtattgttctacggatagaagtagaccaaggaacattaattttttcgtctcttgtaactctttttaaaaatactttaaaaatagctgttctgattaatcatggttctgatacttgcaaaagaattgatgaagtcacttgttcaacctgcttttgtgctaacggacttgagactttactcttggctttttcacttataatcagaacacctgatcagaatatacatactgaatacagatatcttaatagtagttaagctaagataaattgtatggcaaggaaaatacattgccacattaccttgacctcctgccaggatttatgtttatcttttatctttgatttttatattcattaatgattaaaaaactaaaattgcatacatttatcatgtacaacacgatgttttgaaatatgtatacgttctggaatggctacattgaactaattaatacatgttttacttcatatgcttagcatgtttcatggtgagtatacttaatatctactctcgcagcaatttttaggaatacaatacattgttataaactaggttgtacaatagatctcctgaacttatttttcctatctaactgaaattttgtgtcctttgaccaacatcttcccaacccctgccccacagcccctggtaaacaccattctactctctacttctatgaattcaactttttagattccatgtgttagtgagatcatgtggtacttatctttctgtgcctggcttatttcacttaatatcctccagatttacacatgctgtctcaatgacaaaatttccttctttttaaaggatgaaaaaggatgacaatgaaatgctagcatttcatagtcagaacttatgtgttaacatttctagtactaatgacatacttcacataaaggattactttacatcttggttcactggaatgagtgcagtaagtaaattttaatgccaagtagcaaatgaatcttttgaaggagctgccactttatatgtgttattacaaagtattattgactttaaatgctgcgtttcattcactttctggatgtggcaaaggatatgaagtcagatcaacttaatgtgcgggacttttacatttgtctctaatgtctgagaaggaaagtgatattctactttatcccatgcaccacaatgtaaacaaatatttttaacatacacggaatagtaaaaatcattatatggtatttttctgtttaatttatattgtggatacatgactcatttcagcagagacttatttagctctctgcatactttaatatcagcaacattcagttaaaaggtatcaggtttctttactgagaaccaaagcggtaaaccattttgtgtatttgtttaattaccagtgcaccatttgaattgacatgttaatataactttccattggagggaaaatgtaatcttttatttttgtttcttatctaatgaaagctactctgttagatgggctagtttggcaatttgacttaggaaaaagtaatatggaatgaagtttttatatgaacaaggaaaataaattaactttactgctcatctcattggtctgccaaattggaaagacattttaggcctcattctcatgttctaattagtctctggaggacattcatggacaattcactgttcattaatctatcgtcttcctttaactttgatttgttcattatccttttagagtctcaaatatagaaaccaaaaattgatgtgtagtgttaatgtgcttacagatgttgataccacctatccagataagaagtccatcttaatgtacatcacatcactcttccaagttttgcctcaacaagtgagcattgaagccatccaggaagtggaaatgttgccaaggccacctaaagtgactaaagaagaacattttcagttacatcatcaaatgcactattctcaacaggtaaagtgtgtaaaggacagctactattcaagatgttttctgttttatatgcatttttaggtattacgtgcacatatatatataacttatatgtatatacacgtgtatatatacaaagcctaatgtatgtatatgtacaaaaagagacagactaaaccttttcaattttgcttcattgactacaatattcatttcaaaacatattttaaaaatactattcatatgtaccatatcataggaatatagaacataatatattaaatttccattgtgtaacacacaatgaaatgaaaggcaaacttacgtacatattaaactctaaaatcttcatcaactagaacaaagagctagagaaagattaaaggcaaatacagtttttaatcattaaaaaatactttatgacaatatgatgtacaaagtcagattttgattattcaggataacaattttgaaaatagaaaagtgttttaaactatttcaaataaacaataaagaaaaacatgatgaaattcttcgttacataattgtatagaatttagtggggttcttccatgacattggcttgttctttctctcaacagtgggtggtttggatgttttcctatgctttctcaggcacaaacaacagtgaagaaacctttagcaacatttctgctgaatgtgtggagagctcttaggccaaactctctcactttgctgagctagctctgtattagcttatgaaatttttagtcctttccagggtatggacctgatgaattctgtttttatttactttggatttagagaaaattgcttatggatgcctgtttttgccggattgaagagtaccatcccatataaatgttggagttgtgttactttggaatcctcatggctaaatagcatgctcatatcttcccagatcatttactctccaacatgatattaagtgccttcattctgggagtataccaatttcgaatatcatttatatatgtttagtattaaacattgaatctcaccatttccatttaatgttctgttttctaccatgttggaaagtagtcctttcgggttacttatggtttttccccctcctctctatccactcccccaaacccttctctgcagatcacggtcagtctagcacagggatatgagagaacttcttcccctaagcctcgattcaagagctatgcctacacacaggctgcttatgtcaccacctctgaccctacacggagcccatttccttcacaggtctgtcaacatttactctctgttgtacaaaccagagaactgcttccaagataatctaacactgcttttacttgcttgaatttttcagtgccttttatctcctcgtgaagagctggtttgtttttccaagttttattgattccctcatgtgattctgctttgttattgagtcttctctaggtttactatacgttgattcttcataaatatgaattcccgtaatggtttctactttcattatgtaataacctctaaggttctctttgacaaaggctgctaatggttataaaaaacatgaggctcatgaaaagttttatatatgtaacttcgaaaagtgtaggtacatctgtgaaaattgctaattacactatttggggagatttttctggatctacgtaaaggaaatacatacattctaagtgaattattttatctattcattctaaaatatatattctatgtaagaaaaatataactgcaagcttcttcatatgctctcctttaattttgctaatttaaacttgtgtatagcaggctctgtagtatttataagaaaaagtcacactgaaaccaggtcatattctcggcaatgtttagtactttctatatgaggaagactcagtggagttttccaccctttcaatattgtatggaacccaatatacaagaaatagccttataaatgttacagcgtgggaatgaaatgtgctaggattgctagatttgcaagaattactttttaacaaaaatgatttattttgctcaatggagccaattcgaaacgtgctagaggatgtgatttttatcaaaactacactatgaatgggagtttaaaaatgatagacctgatcctatcggctaaaaaatgtgtacatttttggagactcaattttttgttaagatagtggtgtgcatttaattagtaatttatttggcagttaatcgatgcattagctgaaaattctaagctttgaaatagttatgacctccatccttggctagtttacttgcaaagctctcttctcactctctctcattctggacctcttgactctccatcgactctctagactcaatttatcaccattccctccgttgaaatcaccaagacttaaggaataagtgccacctcctaagattaaggagcatacaccaagcaaagatataggggtttttttccccctctcattatcactttattgagctgccttttctaggttttctccaatgcctattctggtagcacattttcacctcatcaccaccttcattaaggcatcgctcaggtatgactccttaatgaagtaattacaaatggacttacatcttgctaggctctgctcattctacctttgtgtaaatattaccaaatacataatatgtcataaatcacagataattcaacaaattcacttacttgttttatttaaaataagccattcaaataaatgtaatgtttatcatttaaaaaagacacagcacaaatcacaagagatgggggatggggaatgatatattctgtcactaaaggaagcatatcagaagatgatgttacatgtagttaggtttgataagtgtatgccttaattattcacactaagaacatttatttcaaaagtgtcaaaaggactgagctttcactgcccctacaggctgtacctgctctacttcaaaggaactcaagacaggctggatctgattccatcagaaagctttattaaagtgtttacttgctggtctacagagaaaaataacgttctctataagaggagagagccatgtgggtgactgtcccctatggaaaacacgtgcatgccctcactccccagacacatcactctgctttaacttcatttatttattcaacaaataagtattcttaatcacagagacaaatggcttttattcagctctcctaactttctaccactgatgaaacatttttctcagcctctacactcagcgggttcttcctctctgactattctgtgtctttcattacctggctctttctgttcttccaacttctttagcttatgaaactcatgggaaatatcttggcattcttatctctgtacttgttcttttatcaacataatttaataataatttaataacctggcttcaatctgtattcaatctgtatgcaaatgatcattgtatctctgtcttcaccacttccaatcttacttgagttatagccacatttccaattaattttcaactctttgtatgtatctataccttgatatccactaatatctcaaacctagtatgtctccaagtgaagtttattatgaagtttcttgtccattttttaatgttattcagagccctaataatacaatttttttcgcttaattttgtccatataacaaggctactctcctaaactgcctcgaaaagatttatgatatattaatattttatatttttatgctcattacacacgtatttcatgttccttcaaccaaattacatcactcgttctcccacacaggtgccccaaaattttccatattagcttttatgcttcccttagctcagagtgcttttgtctctgttttaaattggccaacttaatttgtatttctaggcctaattagtaagtggcagaacctgaattcaaatttgcatttattcaactccatgcccatgctcattatagtagggtgacgctgcactttctcgacggtgattcttatatattgcgttacgcacacatagagcagtattcatacatttgattatttagcgcttgtgtttgaatcacctattatgtgccaggtactgttattgaagcaagtgacacataaacatgcaaaacaatctgtgtctgaaagtattctaattttattatcctcctgctgtcttccctcatgccatacgtttttaactcatttaataaatggtaaggccgggcgtggtggctcatgcctgtactcccagtactttgggaggccaaggtgggtggatcacctgaggtcagagttcgagaccaaccgaaccaacatggtaaaaccccatctctactaaaaatacaaaattagctgggtgtggtggcgcacacctgtaatcccagctactcgggaggctgaggcaggagaatcacttgaacccgggaggtggaggttgcagtgagttgaaatcatgccattgcactacagcatgggcaacaagagtgaaactctgtctcaaaaatacataaataaaaaaaataaatggtatgatatgagccttttaattttatctgtgagcttttctgtttcatgatcctctagcatagcatatctggtagcagaattggaggccaatatttcatcaaagtcatttccctcctgatgcagtagatgtgacttatgaaataattagagaaatcaaggattaccgtgaggtttcttacttaagcaactggccaaatagagttgccacaaaccaagatgggtgagactgtagaaggaacaggtttgggagtgaacgttaggatttcagttttaaacatattaatcttgaggtgcctatgaggctatgaatgcatgtaaagaaggggttctaagatcagagttgaggataataatttagaagtcaacacatagatgttatttaaatccatcggccaggataagattgccaaggaaaaatgtgtagacagatgagatctctagatgtatatatgatgaggcatcagcaaaggggctgaaaaaggtggctagaaaggggagagaaaaaggagaagatagatgtggcattctggaatccagaagaaagtgttttcagagaaaggaagatacctaactacattaaatattgctgatgagttcaaataacatgatgattgaaaattattcagtgaatttaggaaaacagtagggtacgatgtctgggaaatcctaatatatagcagttactacagtggaattactaacactcctattcactcttaaaactttcccattttgaccgataaagttacatgctctctctagtttatatcccctttaataagaacaatttcagtggtgtgtgcatgtgtgtgtatttggaggtgttgctgattagagtaggttcaaacgacagtaaaagtgaaggctaccctcattgtaacacttaaaaaaacaaactacaccgcgagctgggtgtagtggctcatgcctgtaatcccgcctcttttggaggatgacgcggggagatcacttgaggctaggagtttgagaccagcctggccaacatggcaaaatgctgtttctactgaaaacacaaaaattaagcgagtgtggtggcacacacctgtaatcccagctacttgggaagctgaggcatgaggattgcttgaagccaggaggtggaggttgcagtgagctgagatcggccactgcactccagcctgggtgacagggcaagactcggtctcaaaacactaccctgaatagttgatggccacagggacaaaaacatacttcttttaaattaacccatcctgataactaatcatgtgtctatatgtattagttcgatttttgatgcaacaactacaaacctagtgcccctaatcaacacatattcattattttacagttctttagttcagatgtttaaaacaggtctcattcagctaacattaacatatcagcagggctgccttccttttggaggctgtagaggagaatccatttccatgccttttctagcttctagaggctgaccacattcactggctcattgccccctttcaacttcaaagctaacaagggcaaattgagtctttctcatatgacatcactcttacctatactcttctgcccccctacatctacttttaagagccttcattattacttacttgctatgtgaccttcagagaatttcttgaactctgggcctcagtttcctcatgtgtattattgaaactgtttctaactcatatagttattaggagtgttaaatgagattaattttataaagaacattgcatggtataagcacattgtaagttctcaaaacccggcaaccaatatgattactactttagatacatcaggggttagataagattttgtggtctgatctgagaaaatttttatgtttttattagcacttttatgagaagagatagcctggattctgatttataaacaaactcacaacctgtatagagttcggcaagttaatataccgagtaaaagattctaaggaaaaggatatccttttttgttctgaggttgctgaggaacaatcttggaaccatgcagagcagaacatagtaatgccttttataaagcagaaaaagcacttctgggtgattttacatccagcaatcctgtgttgggaggggatgaggcagaggagatttttcactctatctctgcctttgccccctcctggcacaacttgtccctcagactgtccacatattgtagaaagtaattggcaaacagaggatgggaagccagccagggagaccactccttagattaaaagtatcactaatttgcttcgaggaagcctttatacatcctgatgtgactgaacaaattacccagaaacagaattgttaggttttagctcaactctataaattggtacactgaagacttctgagtagaattttaaaactggaaggaaccttgaagtgaatatatgtgatgatgttattttcaacagttacactcttatcgtttaacttcttttgaaatttactttattgtgtgtaagaacacttaacatgggattcaccctcttaactgatttttaagtgtaaaatacagcattgttcagtataggtacaagttgtacaacagatcttgagaattttctcatctttcatagctgaaccttcgttaattagcagcttcccacttcctcctctccacagcctctagcaactactatttcactctctgatttgatcagcttgagtattttacatacctcttataagtagaatcatggagtgtttgtccttatgtgactgtcttatttcacttcccataatgtccttagggttcatccatgttgttaatgtggcaggatctctttctttttgaatattaatagtaatctcttgtatgtatataccacattttctttatcccctcatccatcagtggacactgaggatgtttccacatcttggctcttgtgaatggtgttgcaatgaacatggcattgcaggtatcccttcaagatcctgatttcaattcttttggataaatatccaaaagtgagattgctagatcaagtgggagttctgtttttaatttttgaggagcaactatattattttccataatagccatgccattttttacttcaccaacggtgtacaatagttccaattattccacatccttactaatccattttttaatagtaggcatccaacaggtataaatgtgatagctcattctgcttttcatttacatttccctgataattcataatgttgaacatattttcatacacctgttgaccatttgggtgtcgtctttggagaaatgtctgttcaagcctttagcccatttttaattgcgtttttagtttttttttttttgccaatgagttgtaggaattctttatatattttagaagataaccagttgttaatataatataaggtcttcaggtctgatcacaaaatcttacctaagccctgatgtatttaaaatagtaatcatgatattggttgctgtctttttgataacttagaatgtagctataccatgaagtattctttatataattcattttatttaaccctcctaatagctctgagttagaaataattctcataatatatatatatggtttgtattttcccattccatagattgccttttcacagtgttgatttgttcccttttctaaacagaagatttttagttttatgtagtcttaattctattttttttgcttttattgcttgtgcttttggaaataattgcgaggatgaatgtcacaagatttttccaatgttttcttctaggagttttatggattgaggttttacatttacatattttatccgtttggagttgatatttgcatatggcataagataagcaccaatttcattattttgcacgtggatatccagtttttccaacaccatttgttgaagagattatcctttcctccttgtgtatgcttggctctatcgtggaacatcagttaaccctatatgtgtagatttatatctgggctctattctgttctattggtctatatgtctgtcttcatgacaatacaatttatttttaattactgtagtttagtaatatattttgaaatcaggaagtgtgatacctccaattttgtacttctttctcaaggttgatttagccatttgggattctttgtggttccatatgaatttcagagtttttctctgtttctgtgaaaaatgccattggaattttgataaagattatattagttctgtagatttctttgaatgtaatgacaattttaagtccttcgatccatgaatgtaggatgtctttccatttgattttgtcatctttaatttctttcatcaatgttttatagttttcagtacatactctttgacctctttagtttattactgttttctttttggtgctcttgtgaatggaatttgtctcctagaaactcaactaatttttgtatgatgattttgtatcctacaactttactgatttttaaattggttctagtgtttttaatggattctagggttttctattcataagattatgtcatctgcaaataggaataacattcttcatttctgatttatatacctttacttttttttttttgcctaattattctagcaaggacttccagtattgccatcggtagaagtggcaagaatgggcatacttaccttgttcctcctgttcctgatttcatagaaaatcctttcagttcgcagttgttgtgatatgacctgcgatctttttatatatggcttttacattgaagcaatttccttctattcctagtttgttgagagtttaatggttttttttaaatagtgaaattgtgttgaattttgccaaacaagttttcagcatctaatgaaatgaacatgtgacttcttatttattctgttaacgtggtgtatcatactaattgattttcatgttgaaccatccttgtatcccaaggataaatctcacttggtcatggtatatgatccttttaatgtgttgttaaaatttgccagaattttgttgagaattttgcctctatatctgtcaaggatattgagttgcagttttcttgggatgtctttttctggctttggtaatgctgaccttataaagtgaatttggaagtgctccctccacttcagttttttcaaagagttcgtgaagcattggcattaattttctttaaaaaatgtttgatagaaatcacttatgaagtcacctcgtcttttgcttttctttgttgagagtttaaaaattacttactcaatcccttacttgtattgatctattcagacttttccatttttacacagttcagatttggtaggttttatgtttctaggaatttaaccatgtttttagattacagtttcttggtgtaaaattgttcatagtggtctctttatgaagattaaaggagcgttattgtgttatagtccaaaaacctagaggtttttaaaaaaatgatttagtgtaagtaacttaaaaacaaaaagttatttaaggtaaagccctcattaagtatgaaaattttataaggatagtataaccaaaatacatcatttattccactaggtgtgtctgcatttaggaaatatgttaaatgcctagcatgtaatttacatttattatttctgatcttcaaaaaaatcttacaaagatgtaactccacaaatggagttacctatcaaaataggttaggaaattgatgcttaaaaaaagctttgaatagtgtgggaatgttatttttcttcttgacatataagtgataattctaaataagaataggaaattttctgtcatccatgtcccaaatacatttcctgttttgtcctctgaattattctattcatgtttattttgatgtaaataagaattttaatggtgttaaacttttcgaagaacattaaggaatattccatagctaagatattaagatgaaaacaggagtataataggaatctagtctgtgggacctgcatatgctattttctctctattactcagttttctcatctctaaaataaagatactttcaactttccatggggtggctaaaataattaatgcatagtgtatgtgagaaaagcctccactatcacatagagtgttagaggggaaagactccattcaccttcttacacaacaggcattcaataagtagttaagggtaaagaaatatttacaacaacgtggatcaacactcttccattttgcattatatttataaatgataatgtaatcttaaaaatataagtcaaaaaatgtagaatgaaagtccatttttacatttggtaaagatatttggagtttctggaagagatgatatataattttaccaaccattctagaaaatgacttttttgtctcttgataccagagataggtccagaggtattgctgtggatgttacaaaaatagagtcaatttttgcgaaccaaggatatttgaatgctctcatttaagtcatgtttattacattttatgggatttgtcggttcctagaatttgaatgaattattggatggaatttagctaatctgtgttccggtgtttaagcaggtcagggcggcttatttgtaatcattaatagtttgtttggatctccacatgtaggctagatgcagtatgccttctttaggaagggcctcttaaggaatatctttttcaaacatttattttaatacttttttatttttatgttttattatttttcttttacaaatcaagtctttatggaagtaagaattcgtgttacaactgattgaccttagttgtgtgactcagttatctcttggcatacctgtgtaatgcttagctcacctgtgtaatacaggtgtgcttaccttgttcaccagtaactattgccatatagcaaatcaactcaaaacttgggagcttataaaaacaacattcgtttttcttattatctcttttgattctgggtctcagatgggttcagggcttctcatataggtgtaataaaatagtagatgaagctgaagtcattttgaaggcttcttcactaacatgcctggtggctactgctggaacttcagccagggcagttggctggaacatgtatatgtggccttatttaatctgcagtcactcactaaatgctggctggattccaagagtaagtgacccaaagagtaccaagcagaaactctattgccttttgtgacttagtcttggaagtcacatagtataacttcttccatagtcaggggtccatcctagtcaaggggcagaaacataaacccaactcttgatggagaagtatcagtgttacatccgaagaataacatgtaagatgaaacatattgtatccatcttaaaaaaatacaatctgtcagaacttacaagattcttctgaagaatccaggttagttgggaaatgtggctagcatggtgcctaacaggtgttcaataaagtgcactctacttactgatgactgtacttgttttaggtaagcttgtacagatcttcaaatatccaggctcctgattaagaagtttgagaatgtccttgcacataagtgtcacagagtaggagccgaaatggccacttaattgctttctagcacaaatgaaatttcaaatccatttggaaataatttgtatgtgtaatttaataccaagaatattaagtagacactgaaacctctacacctttcattttacaggtgaagacactcaagctgagatatgctaagtcatgtacctaagattacagagcagaaatatttggtctaggatcctgatatcctgaattttgttaaacatgatgtcttcttaaggattataattattttaagctaattcatcacactgtcacattttctgtagggcgatctctagtttctacattcattaagtaatttgattttcttttttgcattaattttattacaatctattttgttttcagaaaatattttaatatttttaatcttttctctttaaattattaaccttatattttaatgaaactatattcaaagtgttgtaacatcataattaagatacatgacaaccatgattgaaaatgaaaacttagatacatttctttcttttcttttcttttctttttttttttttttttttttttgagatggagtttttgctctgttgccccggctgaagtgcactggcacgatcttggctcaatgcaacctctgcctcctgggttcaagcaactctcctgcctcagcctcctgagtagctggtattacaggtgcctgccaccacacccagctaatttttgtatttttcagtagagacgaggtttccccattttggccaggctggtctcgaactcttgacctcaggtgatccagccgccttggccatccaaagttctgtgattacagatgtgagccattgtgcccggccatacagatatattccttaaaatgtataattagtggatacccatgcctaattttaatccctgctatagaattctggcagcacatatccttgcatattgtggtctttatctacaaataatatcagtgaaaaaatgtaataatgcttggttaatcaacataaacttgttaccaaacttgtagattaacacagagcctcctattatgtcatacatgtgttaaatccatgtgggtctcaaatctactagcaaacttttttgttttcactaagagtttacccccttaagcatgtcaatgtaaagaaaaatattaattcttttgaagagataccttatttagtaataattagagtgactttaaaatcaacacataattaacggtcacatattttgttcattataaagtttaatagaaatacagtcattttttaaattatgagaatgctatcaattaaatctttggggaaataaactatctttggaaggattaatgatgagttgatggtatcgttatgaaactcctcatttctagatcatctgcataccaattcagctacataaagtcatgttcctcttttatgtgtagcaaatccagattttcaagcttagcattttaaatacttacttctattaggtaacttatttaaagtgtaatgatgccaatgatgagaggtatgtataacaatgggattacttcacaataaaacttacttatagtgaatatttatgaaaatgtttattaggtgtctctgggaactctggtcaatttaaaatcttagtacattttatcttcattataacatgtcccaaggaaatttttggctgaaagattagcattataaaaatagaactttaattagaaatttctatattgtgtgtcagattgctaaatccagtggcaattatctgcttcctaagatatgtagtcctctttctgaaacattcaaatttactttataatacctgaaaaagtcatttcaagaagaaatttagatcattaatggaatgagaaataagattagcccgtggattcttctacttctactttataatttaaatttcaggtgagctaggtgattaaagtcattttaactatttggtacctcaaatagttcaggaacaagtatgccggaagcactgtagtattaccattaatttaataattgcttattggccacttgatcctagaagccaggaataaatgtgaaataaagtttttataagctcttaaaaatcttaacatttctattgcttcatagagcatgattatagttaattatttatggagtcaataaaggaatttagtatggcaattcttgcatcatgtattggttatgatgcttttaagaaagactctaaggaaagttagaagtcaaatataaagttgggaaaattattagtaacatttataacatacgaaggattgatagccctcatatataaataatgctgataaatcaataagtaaaactagaatgccccaataggaaaattcataaagaacatgagccagaaaatgacaaaagcgaaaaagcccatatatcattaagtatgtaaaaagacataccatctacttaataaaaaaatataatataaacaatcaaattatttttaactaccagataggcagattgaaacagtgataatactgataattttgcagaacataaagaaacaggaaacatcaaaagttgtaagagggcttatgacagaataaattgatgctgtccttctggtgcataattttttaatcacaaaatttaaatttaggagtaataatctggtaaatgaaatgatgtaagacatagttaaaacaggttttcaaagagggaaagtttaataaacacttgaatagtgatcaccataggattaataaaacttagggtaaatatttttaatgcaatatcatgaaatctttaaaattcatgctatagttatatacttaataccatgctgtaaagatagcactgatacatggttagattataagcaaagttttcaaatagagtatatatctgtgtgttacgtgtgcatatatatgtgtgtgtgtgggtatatacatacagcaatacacatatctaccaataatactaaacacttacatagggagtatgttctattcgaagttatacatatgggttgtctctaacagcactttatctctgtgcctatttccctagtctcatcctcataactagaactctaaatccattatgtatacacactgtgtgtgtgtgtgtgtgtgtgtgtgtgtgtgtgtgtatgtatgtgtgtgtgtgtgtgttttgtatgtgctataacatttcacttttgcttctatggtgcaatttttttcattggaaatttaacaacttactatttttaccgtcttaatttttaaacaaataagtcattattactcagtggcccttgaaatattgaggcaatatgtctcaaaaacttcttgttaggtgaatggttacattcactccttctttctttctttttttttttattatacttttagggtacatgtgcacaatgtgcaggttagttacatatgtatacatgtgccatgttggtgtgctgcacccattaactcatcatttaacattaggtatatctcctaatgctatcccttccccctccccccaccccactacgggacccagtgtgtgatgttccccttcctgtgtccatgtgttctcattgttcgattcccacctatgagtgagaacatgcggtgtttggttttttgtccttgcgatagtttgctgagaatgatggtttccagcttcatccatgtccctacaaaggacatgaactcatccttttttatggctgcatagtattccatggtgtatatgtggcacattttcttaatccagtctatcattgttggacatttgggttgattccaagtctttgctattgtgagtagtgccacaataagcatacgtgtacatgtatctttatagcagcatgatttataatcctttgggtatatacccagtaatgtgatggctgggtcaagtggtatttctagttctagatccctgaggaatcgccactccttctttcaatagaaaattattgagtaattagtatgtcctagaaactaccataaagctctttaccatgataacccaattgtggtttggagatttactaatgtatcacaatatgcaggttaaagactgctgttagaatgtgttactagtcacttaatgtttattaagtgccatctaaaccagtcattctagatctggttattaaatttcactatgttataataactttttcattccaatgtgcactgtgaatcagcaagggaacgctattcattgtggtcatttggaaacccagcctgatgaaacagctactatctaggatactcccagtcactccgcaaagggaaagaaaattctgaaaggtcttgtgctggcaattaattgcttgaactggaagtgacatatctgcttcagttcacaactcacgagcacaactagttacatggtctcacccaacttagaactaagaaatatattcgtattacatgtctcaaaggtagaaagctggaaataaatatgaatggtgttaataactgctacactgctaaatttatgttgtcagaaacatctaaggacaaaatgaactatgaaataaaaacatggccatgctctcaaaatttgttttttttgatatgaactcttcaagcataaaaaattaaattccaaaattgaaatcataaactaagttaacttgctaaaattcatggggtcaaatatgtgatatttgaatactcgctaatagaaatgtctcaaaatgcaataaaaggctttgggggatagtgagccctctgtcagagtagtgtttaagtatagactacctaatgagactggttgtaaaaggcagtcggtcacgggacacatggcttattaatatgttcacttactatgtactggaaccatatagctgtctaagatgagctttcttctcctttgcaagccttaaatccataattctaatcgatgggtcttgtggaatagtggtaactattatggaatgagagacagtgaaccaagcatggggaacatatatggccatattattgcccttaaggaatttacaaactgagtaagtagagaagatgttgagagtagttctaaatcctgaaataatttcactttacactcggaagaaaatccaaaacaccatcgtgatttgttccctataggtatcctaccttctttcctacccttaaccccatttctcagctccagatacactggcctactagcttggcatcaaatacgccaagcatactttgagttcagtgactttacacatgtatctccctcttcctggaagggtttttcccccagttattcatatggcgcacttcctttaccttagactgcaaagagatcttttctgactaccctatttgatatgccactaccattgttctgtcttctttcaaagctttaatttttttcctcattgtagttatcactactgacattacgatatttgcaggtcgtttttccctaatgagtaaaaactccaagaggaaaaggactagaatatatactaggtacataaagcatattgatcaaatgaatgaaagcatcacgtttcttttatatgccccagtttgcgattgtattgtatattctaagagttgagtgaacagcaatacttaagggagcagctgcccgtgaatctaatatattgttcagggttttgaagcaggtcctgcaatataaaccctgctgcagcacagttttacgtcatcttccttctcttactatgaattattaatcccatcaacctcatcgtaatagaagagttacgtataaaagaatgagtaatacaaggtgggatatgctaccttgtatttcaaacacatgtttgatttttccaaactaatttcagtgattggagagatcgtacaaatatggatatataaggcttattactagcgtgatgaatgggatccaagaatcggcagtttatgcatcctacaatggtccatcgactcgtactcaggaagatttccatagagtaagttcatcttgaacagagctttttacgaggcttagataagaaaagaatgaaaatactttaggtgggacatgatttcaataaatggtattactaaagccatggaaataaccctatgcttaagagatggacgaaacagatattttggaatctttgctgctctaagattctttatcgcctaatagcaaaaagattagataaagaggaaaactatcacttactggtcaaaggtagaaaatgtatggagaagaaatcagtgaaaagtgatgtaaaatatgtaactaggaaataaataaggctagagaaggtaccagaagtagatgagcagctgtggactgttacccccactcccgtctcaaatataaggggcgtagcctgagggttttctgttcaaaacaactttgactgtgtgtgtgtgtgtatgtgtttctgtgtgtgtgtgctggggagaaaggttggggtgggtggaaggagagttgatggggggagagagacagcaaacaatgttgaggctcaaaatgaaatttctatttttaagtacattttgaaaatattggcttatataaagttttcactaatttttgaagtaatattaaatatatgagtcttttaacaaatattgggcattcataatttgagatgtaatacctaattttgaatgaaataattgtttttctcaataaattaaagcataagaattattggagatttttcaccattccatgagaggaaattttagtagtgtacaaaagtagattaagatttatagacagcctttggcttggagaaacttactctactcagtgcctgaggaccagttgtgaagacagtcttatttgtgttggacaaaaacgtcaggcctttgaaaaaaacaatattcaaagtcagtattttgattgtatttgaagttcttagtgatgtttctaaacgttacgttaaatattagaaaaatattttcatggtcatatgtgtcatggtcataatcaatatgatagcttagttttttaagagtacaaaaatttaggccaggcacggtggctcatgcctgtaatcccagcactctgggaggccgaagcaggcggatcatgagttcaggagttcgagaccagcctgaccaacatggtgaagccccgtctcaagtaaaaatacaaaaatcagccaggtgtggtggcacatgcctgtattcccagctactcagaggctgaggcaggagaatcgcttgaaccccagaggcggaggttgcagtgagccgagatcgcgccactgcactccagcctgggtgacagagtaagactccgtctcaaaaaaaaaaaaaaaaaaaaaaaaaaaaaagtacaaatattagagcgaaacgaacatcaacaatttagtgaacgtttcttgtgtcagtttcagtctcagtatactgtgaaaagggaatgaaaaaaacatgtttaaagtgagtaaaattgattgacgtggtctttttcagcatgttttaagtgtttttcgctttgccaattaaaacttctattttattatttacctaaatctaccccccagtaaacaaaatagtatttccattttcataaaaggcagttccttttctttttcatcacccccatctttagagatctttgactttctattttttctcactgcctgacattaagattccttctgttaaatgtttttgaattacatttagttcataagaaatgtttcccctagactttaagaactttcggacataaaatttttcgccaattttgttcattcacttaacaaggacaaaaaaccagaaagagttgggtgacaatttccattcagtaaatgttctttactaaatctgaattgcatattgtggaatcagtaaatgtcaagaacaagccagtctatcttttcacaaaaaaaaaaaccaaaacctcgttgttactattttctattgtttttctagtttctattttatttacttttgttctgatctttattctttccttctattaacttcccctgtggaataactccaattataccatatcatgaagcaaaacatataactgtagaaatacaaaaggctcaactataacactggactaagcattggctgatctcccctagcatacctagcaatattaatcactcagataattaggcactgtcctatatttttgtaagatttataactttaaatttttcattacatatttttttccagtgactttgagacttatcttactttttagtgtgttaggtttatcagtggtgattttattgttatacatgacctcataatagttgttttttctttcagtacatttgttttatgtttaaatttttatatttacatgattaacttatgcaaattatatgtttaaaaatctgttttattgccaaagttgtaaggagggagtcaaagttcctagtcatttatttattagaattattcacaggagtgacaacgtgcgtaagtttatgttgaccagtcaaattttctcttcacaaaggacagaatgtgaaaagcacagattcttttttggtcatggggcagggaaagataatataactctgactgtgagagaatgagggaggagtagagaagggatcacatgttagtgtttattcttgtttcgtagaatgtactcatattggcctggacagttgccctttgattttaggagattaaaatatactaagcatgtaggcacccacccatacacacatacacaacacaacacacacacacacacacacacggacacgcaaacacagttgctaatcagtctgacttttatctgtaattctggttctgctacttactaaatgtgtgacttaaggtatattactgcacattgtgctcacttttgtctatttggatattttagttgacatttcaccttacataaaaaatgtgttgaaaattgttagcaagaaacaccatagggcatcatcatctgctttgtgatacataaaacatttgttaaaactgttcttttcttctgtaaggacactcaacagatttatcaaataaccattttaagtgtacaatacagtattattagagacaacgttgtgtagcagatctttagaatttattcatcttgcatgatgaaaattttatgcccattaattagcatttccccattttctcctcctttcagcctctaaaagccaccactctaatctctgattctctgagtttggcaattttagatacctggtgtgagtagaatcatgaagtatttgtatttctgtgtctagcttttttcatttacaatataccttcaaggttcatccaacttgtcacatattgcaagttttccttctttttaaagactgaataaaattccattgtatgtatttaccacatcttctttatccattcagctatcgggcatttacgttgttcccacatcgtgactatttttaatcgtgctataatgagcactggagtgctaatagctctttgagatcctgatattttgctctttttttgataaaatggcttcataatagttatttcctcatatcattattctaaaaattgagctgctaagtataaatctgatcacaaagtaaacatgtaaatattattttttaatcacacatgaaggatttttatagtaactttgtgtaaaggtgggtattttcttgtaagttattggaatctattaattttaagggagcattccaaattttaagaggtagaaagaaacaaaattccagtgcctatgtagtttatttcattttaatttaaattatgagatgattgaatagtgttcacattagaagtataggaagatagtttagaggtcaacttctttggtcttgtatttctttttgttaatgaaattaatgtgtgttcagtggaaatatgcacatgtgaatatactgttagtttctttaaataaattatatctccaaatgatataataccatgaagccactacaaagttaagatataaaagagtttaattgcatggcatatttttacaatacattaaataactgaaaatgtagctaagacaacattgtgactggttttgaaaaaataaattatttgtgtggttatacatctatatatgtacttagaacaaaggttatattcagaatattttacactagactcttttcaattaattttataggagtttcatttctctgaattttcatttgtcagtgaaattacatattttaaaacatgcaaaaataaataaaacatgtaatttaaaaatgtaaaactcttttacatatatttttaaatgtcaataaatgaaaaactcttacatatatttttcaatttcaataaatgaaaatcaggaaaatagtgacatggtcttcaaaaatcacaatttaatagagaaaactgaagataggaaataatattctaattacggacaatgattaacactggcagaactggtaaatagtacactataaaataaaatactacattaagatatataatcagaggacatcatacctcaatacatatgtgtttgttttgttttttaaagacacgggctaacattactaattactgaaggatggagaatgttaactgagcttgtaatgataagccggtgcagataaataaaatggtataacaatcatcacagtttataaaaccctaagagtttgttaaatgtgcataatagcgtccacaatcccgctaacacaatctccaaacatttttgtgtacacatagtgtaaaggatccagaatttcaatcatattctcaaaagaattcattgccccaaaatggcaatgaaattctgagaaaaatagggtatggtgagactctgaggacttggaaagccaggcaaaatactacttatttctatggtacagacagataagtcctttatgttatattatccatgttgaaaatctggtagattgggaagcaggaaagaggtttcatgtttcagctgcaaactttgtgttcgtggaaagacaagagcaagtgctacataagttgagccattcccagaacaggtagtgaaagggctctattgcttcaactgaagaatgtgttatgctcttatgtataagagggattcttcacaccttataaaatgttcatatcccttttacgtgctttgtattatttatgccccagtgagcttacttgtgagataaaagatgaaatttttaactctgtcaactaaaaacaaccttatatatcttgaatgagttgaccaaagtagtatggttagaaactgataggtatgtcactcaacccaagttttccaatttctgggctctgaatcattttattagcctaagctccttcctgagtgttgatcttagataatgaaccagttactcttagataatgtctgtgatgatgaataatgtcacaaaaattactaactgatattggacaatcattatataacaaacattgctgtaaacacttttcatacattaattcaatgtttataacaaccctattgagaagattctgttaatatatccattttacacttgagaaaattgataagctggttaagaaatctgtgcacagttatgcacatgaaaagcagctgtgccaggatttgaacacacacacaatctcattccagaattgattctattaacctgtatgctaaaatgacacaacatagagctttatgaagctatcattagaggaaaggttgggttttcataaacacacttatgcacacacttcatgatttactaaaagtggatgaatatataagcaatataatgacaaattataaatcaggcaaccagaaaataagaaggtaaaatacaggcaggtttaaaataaaggttactttataaaatgaaaggtgaagtttgggaactggtaatgaggaagaataattgctgtgaaatctatcaacagatgacttcattaatcttttttccttgaaagagattcagatgatattaccatctctttcaggagtggaagagagagaattggagagaaatgttttaaagattctgatttatagcaagcctgtgaaaaaatggtgcattaaattcccatttggcatcctagttgtagtaagataatacatcctttctaaaaattccatttgatgaataagcaaaccaattcaaaatgactccattttattgataatagcatcagtgtcattaatgagaatgctttttgactaacagcaattaactagatttggtgaactgagcaattgaacattgaatttgaaatcagaacattcggcactgaagatgatataagtacatattagaatgattgttgattatttaaggatttattaagttgatgaagaacattaaagtctattatatcctgtattatttaggatgcttggtttcaaatgtactcaagatacaaagagaatttgttggctaagtaaagagttcaaggtttgctcaagggtttaatacagagttttattatggatttaaggagaagtctttgcttctctgttaatctaagcctaccctccataacttttcgaactcatacagaccggcttccctcagcagatcttggaaactcttttcccttgtttacagctaaatgtaaagaatatatctttacccaaataggaaacaaaaggtctgagtttctctctgcttggaaactcttagatcatatgcctggcctgaacacctccctgaagcaaagtacatagcagtatcccacttggcttgcacaaaaaccgagcgcatatctagaactgagagtaataacaatgctttccaaatcaccaggctactgtgccatcagagagtagaagaaaggatattgactgtataattgcagtgcttactacagtcctcctctttgaatatccaacattgctatacacccttcatagcatatattcactttcaaagatgctcagactcctcaaaaagagcaagtataaaacattatccagtgattgcattcagctccaaggttgggatatctgggtgattagcagtccctttcaattagtctttatgatccatccagtggactatgactaagtgaaaaaatttgatgtccagtactgctaagtaaaaagttagaagggcacatcctgattaaaactaaactaaatttataaaagaaaccaaattgaaacagatattatatcctgcactttcagagccttcctggtgatttttccttctgttcattataaattttgctaaatacttgtcttcatcatgatatctgaagttgacatattttggggttttgtgttactttattattctacttattgtgttgtttaaaagtcctggtgcttgccctaggtttgagtgataacaaggtgtttttagttagacctggggtttctttggcaatcagatttgtttactatttataggctttcagtatttgttcttatcaattccatgacccagtaacccaaattctatgatttggttttaggcttcaaatgttaacctcttttgacatctttaagaggcctctgtgctttgcacaatcccctgactgagaaaatttgcagcacagggttggggtagagggcatagccaatctttgagtatatctttgaagtatagattacatagaagctgcttcttcatgataggagggatcgtctactttgtcacaaaagtgctttagggaagcactatagttgattttttttagtacttaagtcttacattctgcctctcctgtctctgttcatacaaacattcgatttggagtaaaaatacaaattggcttttccactcatatcaggctccaaattatcagcctctcaaggcgttcacgttataagccacaggcagagagggcttcttcagacaaagctatattttcttttttttctgtacttcaaaaacaagtaaccattagcatgaggttttttctttcttggtttaaagaggccagtaggtggcaacatttttgtttctatcaaatctcctaatagtgttggtactcgtaaggcacatgacttaggataaaatagaccattgtttaatcaactgttttttaatcatgtaccaagtatcattttgagttggggtgggggaggtttatcatccttgtcttctcataattcagcctgttccacattataggatctattaactttcaacaacccacttcctgataccaaagtccatataaactagaatgatgtttggtacaataatggaaaactcttctcaagaaaacttgaaatatgcagacacacacacgcacatgcacacacatacacatacacacacatacagaaaacatccacattggagcagtaacatgtgacatcttttcttccattaaagatttcttgtaattaaaccttgggaattattggcttatgtaacagaaaattccaaaggaatggcaggattctggtaagcctttaatccaaatattcacattgtcatcacactgcagctccgtatctcagtggctcttttggctcttcactcttccgttatctatgccaggtagttatttctttccctatacagttttgttatgatagatggctgccagaactgtaacatttttttctttgcttatgtcaaaggaaaaataagtactttttttctcagtcaagcagaactctggacaccttctggttggaacatgttaagtcatgtttccacagttaatatactgtgttaaagcataaaatgttgtagttggatttttgttctatgtccctggcaaaaaggatttatttaaagcaatcaggacttatgcatgggattggggaggtgattaattgctcccaagccacaagattccttcataaggatggaatatagtttggaaattattttatggtagtatttgaaagagttcagtgttttcccatgatttaataatataaatccttaatagaataaaatatatcatgaattgcaagtgtatttgaaagtgtgtgtgtgtctaattttattggatccagaaaatatgctctattttttcttggaaaatgctgtgttttatatccactgcattttttttatgttctgtacatttcagttggatttctttcaaagggactgccctctatcaatcaaagtcatctttagcataggttaggctattactgatgaatcaaatatttctagagcaatactttaggacctgtcccacaactaatatattcaaaatttagcaaaagtttattgagtacctgttagaagcaaaggactatgctaggtgttctcatatacatgaagataaatatatgtcataaaacaatgacaaattggctttcagaatgtgcttatttccaatatcatcatatttttcttttctgtcatttttcattttatcatataaagaccttgaggggtgttttttcagagaaacaataaaccaatgatggatgagcccacttgagttagttacatactatacagcttatataaagcataagcatataaaaagtatatgcatctactttcatagtttggattgttatttaaatttggtggtattacattttcttctcacagatgactggtcttaaatgtgtactatagaatttacagaaacaaaccatagggtttaataagctgaataaaatgaagctctttatctggttagattactttgtaaaggacaagaataggggagcctcccaggtcaacctgatgtatgattttccatttttctaaataagttttattgacttttacattttaatggaaaatgagtaattagcagaggtgcagattatatttggcagaaaatgattataatatttttatcagagagtaaaatatatgcagaaatagccaagtaatctgatttgttaataataatagtatcctgattatggttttatcttttgttttaaaataacatttatatagggtcaattttgaagataaatgggaacctggtgaactctgtctctttttctcagagtgtgtgtgtgtatgtacataaatttaaaaatcgaagttatagttaattggaataagaagtttgttgaaaacagtttgatgtctggtaattgagaaatgtttatgaatctgacataatttactaaataatggagagagatacattattcagaacattatataagtacctaggccaaatttctgaaagatccaaggtgagagatatatgtataattatcttggtggtaatttactcatgagtagtattgacattgagatattaacaatttgtaccgacccacttgtagctgagtatatattcttaaattgtgttccaacataaactgtcatctatattggtggatctttgcgatgctttgggttaggtcatcaaaacctaagcaaaccctggggaatgtactttatatgtatattattctcccactcacacacacacacacatcctcactgtttagaagtacacatttgtcaacattacaatgcttttggcattcacagaatctgttcaaattagtacagtgttcactactgccatagcaggaaaaaaactgtacttttgaatcatttatttttaaatcatttgaagtagaaaattctgacaggttgcactgatgaatctttactaaaaataaaggtctttgtttacaaataattacatcttctcaaccagtggtttcatgttgcttactttcttaaaattccaaatagaacaaggtttgcaaaaatcgtcacatatacatgttatcactgttgactgttttatgataatttaggtagcattcattgtacacttacaatatggcaggagcatgtggcagttacttgaatggcaatatttatgaggtttaccaccaatcaagcttcccactatacagattaagattaagacttactgaagggtccttgtgctagtaagaggcagagtaaaatagacctaggcatcttgaattcctaaacctatgatttctaagttatgtcttctggcctttgtgttaaaatttatttctaatcaacagtgatacttttaaaatatacataatagtgtcatatgtgaaggtcaaacactagtaatttaatctgtcaagtacttactgatcatctaatttgtgttaattactgggtgttacttgacttgtcctcaggttctttatgcactagagaggagacagacactcttacagctgctttaagacacagtagagataggaagtataataacttttcatataaatcctctgggaccataaattatagcttcataaatcttggcttagcaggtagcagaaggtataactgaatgatgagccttgatagtcaagtatgatttttataaggagatcatcccatagaaatattacttcactttgtggagctaaatgagaaagaagcacgaatcgtcagttcattttgtgactgttcgtttcgtgtgtagggcatatggttaggggaggaggagtaggagaggcggctggaaaatgaggttgaaggacacattgtggaggattttgcatatcatgctcaaggagatacattttattcagtaggcaagagaagggcattggcaggttttgaataacaagtcatgtgtttcaaccctgggacttatgaagctgaatggagaggcactttgcctttaggaaggattgccaaaaaaaaccaaaaagggccatgctgagttgaaagtgtcaaggttgcctccagaataagctaactgtatttggaaatcagggtttattatcaacagatcagttaagaccagtgatagaatcgcattgcaggggctagggtggagagagataacagagtaatcccaaaaagtacatgaaatttcacagagaaaaaaagtacaatcaaatttgaagaggttcaaggacagaatatttgattgattgttttgttgatcgatctatctatctgtagggaactagaggtgggagacatagttaggtacgatttaagagtttccttaggaaagtaccatcacataacagatatttaaaaagactttaaagaaggtagttatgttaaacagtgctgcaaatgaattgaggaggatgcaggtaggggaagggcaactggatctactgttttagaagtatacttgtgtgctgtgagagggatttttaagtataagtgtggaaaacaagaaataatacatagaattacggctgattatgggaaactggaaggaggaaagtttaatcaattctgaggttcagtgatgaaagtaaggaggagatgggatagttcatagaagaatgatgttaatatttcagattgggagagaattaagagttctgataaactcctaattttgatgatacactctgtggtaggaatctacagtacaccgtaaattcctgtgtataacatacaatgtgctatataaaatatgtggtatcaacctataaatgttgatttttcaggacaaaaatgtccagaaaaatgtaatgaacattcagcatacagcttcgataagaagttttaatcccattagtatttaactaacatactcccatttttagtaagtgattattattagtattgattcctacttaattctcttcaatgccgtagtctctgtattttcctcccttcattaaaaaaaaaaaatctttcaagttcaagttttatcagagagcaagatggcatagggaagagagcagagaccatgacatcactggaacagtttaacatgatttgattttataaaacatgataaaataagtatcaggcggcattttgttttaaaacacttgctgctggaattccactattcatatgataacctgctgatcagtaggactctgtctcctgatgccaagtttttagcaccttctacagcaatgtgtgaataatgcagagatgcgaaggaaccttttaagccaacttgagaaacaagccctgtcaaaaacatgatttctcatgactgaataatgcaacagactattccatttagaaaaacatcagtaaatagtctgagttttgatagtgattacattcttacacttgaggtaaaaaaaatattcttgtctcagtccacaaagttgataggcatagggacatatgagtgtatacactgagggtgtttaacaatgaaatgtgattcaaaaatataacaagatttgataagcaaatgggccagcaatttgaaatgcttcaaattatacttaggctctgagatgaaatgtatgtcatttaagtgtacttttttttttttcccgagatggagtctccctctgtcgccaggctggcatgcagtggcacaatctcggctcactgcaacctccgcctcctgggctcaagcgattcttctgccttagcctcactagtagctgggattacaggcacctgccaccatgcccgactaatttttgtatttttttttttttaaatagtgacaaggttttgctatgttggccaggctggtcttgaactcctgaccttaggtgatccgcccgcctcggcctcccaaagtgctgggattacaggcatgagccacagtgcccagccttaagggtatttttaagtagctcatcaagatgcaattagatttaccattatctgacttgagtagaaaactggaaaaaaaaaaaaaaaaaacacaaaagcagagaatggtgagaacttttaagcgaaggtgtagccgacccagtgtcaaatagacaaaatgtagaaaagacaaatattatacatgtgatcttttctgtcacataatgttgacccctaggatttccatcttatgctttcagtaacagtaaactacaatatttagtgcagtattagatgattatcatgtcctaatacatttcctccataaaactagaagaatggcacttaaggtccaatgaaatatgatggttaaatataatatttgtactcccttgttggtgttgcttaatgcatttcttaatcctccaatttatcgtgtcacacagcactaagctcaacaatttattcataaagtggctgcaaatataatttggaacaaacttttttttgttcaatataatttatttatttattgcttgtataatcacacaaaagtgtgagttccatgaggacagagacagttgtctcttctgtttactacaaacgtcttccgggccagtaataaccagaagttgttacctgttaaataaactgaaagtcaaatgtagggtgatttctacgcatgaggagttctagagctcattgatgtcatccaaggtttaaattcttagtgtaatgtattctaggctcatccatgttgtagcaaatggcaagatttcattctttttttaaggactgaataatattcaattgcatatatgccataatgtctttaatcatttatccatggatacttaaacgttgtttccatatcttggctactgtgaacaatgcttcaatgagcatagaagcccggatatctttacaaggttgtgttattttttcctttgtgtatatgcccagaaggagggattcttgggtcatatggtggttttgaattccttgcctcacaaaaccttgctttgtctttgcttgctgtttttttttttttggagacagattattgctctgttgcccaggttagagttcattgacccaatttcagctcactgcacccctgcctcccaggttcaacgattctacttcctcagcctcccaagtagatgggactacaggcacccaccaccacgcctggctaatttttgttattttagtagagacagggtttcaccatgttggccatgctggtctcgaactcctgaccattcccatcaatgatagactggataaagaaaatgtggcacatatacatggaatactatgcgaccataaaatagaatgagttcttgtcctttgcagggacatggatggagctggaaaccatcattctaagcaaactaacccaggaacagaaaaccaaataccgcatgttctcactcataagtgggagttgaacaatgagaacacatggacacagggaggggaacatcacacaccatcgcctgtctgggagtggagggcaagggtagggagagcattaggataaatacctaatgcatgcagggcttaaaacctggatgacgggttgatgggtgcagcaaaccactatagcacatgtatatttatgtaacaaacctgcacgttctgcacatgtatcccagaacttgaagtataataataaaaaaagacacctaggaatcattctcaacaactgtactgtccttgtcatatttatagtgcccacgtccaatacactctaagatcatatatgtcagaagtctgtcatctccccctctttccctacttctgttttgttgaagtcctcagtatatatctcatcaattcattttttcaacagttcttgagttcttatggcagcagtcaggttctgactattacatactgtcattcactggatatctaactggtcttgctgccctcatcttccatagatcattctccacactgcatccagaatgatctttcataaatataaatgtagtaccaatgttcatggtttgactgtcaattcccccaaaagattaccgggaaaacacgttgatgaaacaacgctgagtgtattagacatggcgccataagggaagacactaacttgacaaggtcttagtagtgtgtaaaaattcctacttctcagttcatatttcgcttcccttttcaatgcttccatttcttcttggacgtgttcttatgagagcacatatattttttgcttacttgtaggtttcctccactggactatgatttccttgagggcagctcttttattctttatatccattgtgatctaagtgagtgattaatacatagttgatacatgaatccacaatatgtgctcattttagtattaattgaatacataagacattgcttcttaagtgtgccttaattggcacaataacaaaatttgttgaggatttactgaagaccaggttcttccatgctgtatgtatattattaacatgtttaacttagcttaccaacattaggagtttatattcttgttattcccattttcagacgagaacactaaggttcagtggtacagaaaagaatttgagtctagatattttgattccacagcccatattcttaattctcggtacactacacttctctagcatgtttgataatatattggtaacactcaattgccaaatgtattctgcatatatcacaaccagtatcctgatatatgttggttgggttatgaaatgacacataatttgttcaacaaacatttattaagtttttacagtatgctagccacaatgtgagattccttatatgtactacctaaattaagtaacttaagtaaatgtaggaggatttgagacatgcatttactttcccctctttgatttctaaggcaccacacattccaggttttcttcctgtttttctagcatctgctttgattttaatttgctggttcttccccatcaacacaaattcctgatatgacagtaaccaggggttggttcttagaccacattcattttctcgatgatcttatctagcctcctggcatcaaatactgtctgtaagttgatgcctcccaatgtttacccccagctcagagctttctgccaaactccaaacttagatacacaactttttatacattcctagtcaattcaaatttaccctatgtaaaactaaatttactaacacccacatctgcttcgtcaatagtttttcctgtgtcagtaaggtttcactatagccttccagttgccccaaatgaacatctttgagtcaaacttagtcttgttctttctcacacctgatgttgttgattagaaaactatgccaggtttggccggatgcggtggctcacgcctgtaatcccagcactttgagaggccgaggcgggcggatcacgaggtcaggagatcgagaccatcctggctaacacggtgaaaccccgtctctactaaaaatacaaaaaatttgccggccgtggtggcaggtgcctgtagtcccagctactcgggaggctgaggcaggagaatggcgtgaacccgggaggcggagcttgtagtgagcggatatcgcgctactgcactccagcctgggtgacagagcgagactccatctcaaaaaaaaaaaaaaaaaaaaacctatgccaggtccaccttaaccaggtatatatccagaatctgatcacttctgactacttacatggccaccaccatcacctctggtctaaattagtgaaatagccttttaaacaagcctgcctgctttggccttgccttacctgtaatccattttgtctgccagatggtcttgttaaaacgtaaggcaaatcacatcactcttctgctgaaaaccttcccatgccttgccagacattcagtaaaatgcagtcctgctgttttataagcccatgcacaatcacctcctcctttctctatgtttcttctctggcttccttttccaccgttgttaccgtctctcattccaccgcagtcatagatgcctctacctggaacacatttcctccacatactcacatgacttactctctcatatctttaaatctttttctcaatgatattttccctagtactttcaattccccttccttgcttccttttctccataacacttacatccttctattttacttatttctcttgattagcatgccttcagtgacatgattcactgaatgagaacttagatttctgtctgttttgtatatggctatatcatcattgcctaaaatagtgcctggtcctttgtagttgcttaataaatatttgttaaagcaacactatttgtactaagtgacagagccagaattccatatgattttcaagctcttctctataaaataaatgaagttatgatgtattgaatgtataaaggctcttttgttagttgctcttctacctggcaagtctgtaattaaaataattttgtaaaaaattatctatttgaagtttttttattatttgttcaattgccagtagataggctagacaaagataagtttaccaattgattatggatatcttacattcttattaaaaagcaaaataataatggatataacacattattattttcatgattaaggatatatcacctctaatgagtagatactaaaagagccttaattttctgattcccttatttctcctcaaggcaaggatagatatccctgtgctgatggcatcgaatgcattggcaagcctaaaatcaaacaagctttctagtagactccactcaagattatcatcaatcttcctttgcaaatttggttttcagtttttgtcttcacattgaaaaatagtcaatatattggcaacaaatgtaatgcattactcaatggcaggtgatatcgctaaagatggtcaattacatgctaaaaacaaaggactttgaggtctgttggatgccaaaacctacagtcaattcagtcaatatttttgacagtacagagggaaaaatcactcaaggaaaattgccacagtatacattaaatatctttgtttatcccattttagttattttgtgtgatatctctaaatgctgttctgtatatgctgctgacaaggagcaaatttatttgtttagaaattctgcagcctttccatcctttgccttaactttcttgttgaggtactaatgagctgtgaaaggccaaatgaaagagaaataacacctccagataatctgtactctgataaactactcccagaataattgggagtttatggttgttgtagggcagtggaagaaataagcaatgttggccaactatacggaacaacccgtgttaataaatttgtaaaagaagtttacaaggcaatcacaatcctttcaaacaaatgtcatgcatgtactttcaggcctaggcacaatgttattatctgaaaagcttgataggtaggattgtattttgtcccactatttctaaatcaggaaattctaagcatacttgtgacgatttctcttttaccttaaatggcttccctattccagatttacagtttctgcatgagttttctactcaatttgcataattttaatttacctttatgttaaggtttttgaagagctgccgtactttcatatttggagtttaacatattttaatttatggacgtggcaataatttgatgacctttttagtgtaatataaagcctatatataaaaacttccaaatagaatatgtactgagtttgtaggaaatttataagtattatgcaaatcaagaatatggtagctgattccactagaggctattttgaaaatataaagaaactttgtttttaaacatagtattgattatctcactatgtgacaaaaaggtatttctgtttattctgtttctttccatttctgctttccaaagtagaacaaataagttgaaatgtaccaatgggtgtgttttaagttttgacaggtttcgggtatgattatataccaacaaaatcccagtaatatttgctgcatatttcattgtatctatattttatgtactgatttaaaatttaaaatgtgagtaaattttaaggcattgtgctaatgaaacttatggtagttcattttttatttttatatagacaagctatctgtttagaatgcaaaaattatatgccatatacaatcatattataaacatataaaattggtcacagaaatttctaagggtgaaaaagactggatgaatcaaagaaatctatccacaattctgtgagtgtatgagagacttagaatgatcacattcacataaaatataacacattattatattttgatttttaaattaaattttataaatctagctatctctgggaaatgtttcttccccttgagttattacaaaaaagtctggcaacaagttaatattcaggatttcgtgagacagatactgaattcagttcccatctctgctttttattagctcttcgaccttgggcaagtttctaacctttatgaatcaggtctcctcatagtaaaatgtagacaataatcatcccttatgttgtgaggttaaattagatgatttagtggagtgcttacaccatccctcacaaatggtaaacacttaattcactatacttcagttctggtggtaaattctaaaagaatttagatgatgaagacagcattataatttaaagcacagtctacacagtggatagcacccacttaggagatacacacgatgaactggggttctagaaggacatattataatgtctcttcacaggcttatttaagaattaagaaagaaataaactttaccaatttttaatatacaggttttcagataatttgatgtaatatatggtacttgatatcttctgtggaaaatcagagatccttaataggatgcataatgtcaggcctctctcttatttattagcgtttttggtgctcttgatgtgctgctatgtctatgaacactaaagtgtgtttatagattatgttatcttaagtagtagaatacttaaaatctttgtcagcaaaatcagagtaacctaggaaatctattttactacacagaaatgttctggacatctcatggcaaagtagttgaaaagattgagttatgtactttatttttgaaaaggtcaagtgttacataaatgctgaacattttcaggttggcaagtggctgtgagtactatgttatttctcaaattatttccaaaagcagaaaaaaaccttcaatctttgaaggagaagcttctgtattaacaatattaagaaagagactagattttataagacattcatgctatggagagagcattttaaaaatggatatttggtggtagtcccattataaataggtcagttataaaatattctatacctacagaaaataaatggaaagaaatgtcaaatctgtttaaaaatattataagtgaaaactttcagtgaggttttgtctctgtttatgactttaggacgtttactttctatgttcacctcacttagggttctgtttcgcttttctgctcatgcttccatttcctcagttggtaatatacacatatctgtacatatcctttaatcctcttctagtatcttcaccaaatcagaagtgattgctcttatcacttagcccaccctgattttgagttttttttttacttgaaaatatgagaagtaatgttagtataacaagagatggaaacttatcaaaaggtttcatacttttatttttctgaaatgcaaaagacttactgcgttcttctcagttctatgaaccctaagatcaaaagctttagttgtctatgggacacagagatacagaccctgaagcatgattactcctattaggagccaatgataaaattgaagaactttccactgctttcagccaacaggatagaggacttttattactttccttgaggcagagggtggaatttgcaggtgttaatgaaatctaccagagtcttcccaagaattaataccattctttgaaatggcaggctctgaagacctttccttgaataggaaaggaataggaagagattccaagaatctctttccttgaatagggaagccaacactgcattgaagaaggcagtaagtgaaataaacaagtggagtttgtgtcatttcttgtccctgctctgtcatggaaagatgccttggtctaattctcttaggaaaaaaaatgtcctcatatcagtataaggtaaaatggaatattgttacatgtcatatgctaagagacacattattgtattcaacaaacatatagtatgttatactgtatgtcaggtgctgaacaaaataaactgtctactgtcgtgaggcttccgagatgctacatcacctctcataaaagaacttccccatttccacaatcacacccttataattgtcttcctaattagctcactagttatttatattatttccctaattttaataatgaaactatcccacagaagcactatagatgcccaagaagtagagacaggaagctacccattagttcccccatagggatttctctcccttatgaaggatataccacatctttgtttaaggaataaggaaaagagacaaaggtatgtaacataaataaagagaaagcacacagaatttagtgatatatgtgaaaggtaacgggataaaccaagcaactggtgtatgttaaggaggtgaatatagctaatgtccttggagaaaatttacctagttagaaaagatgtgtcaatttagtagaatatttttacaacctaaaatctaattgaaccaaactcctctttattgttgttagttctctattctgggttgcactaaataaaaacaatgaggcagtgaaagtgattttataaaagttgaatggcaaagggtgatgctgaatgtcaatacaatcgctgtatgttgtctgtgagccttacaattaccctctaaattagtatcatatctattttcaggtgtgtaccaagagtgtgaaattaaaaaactttgccaagttcaagtacacactacctataaattccagaacctgaatttgacctcatgtttattttactccaaagtgaggccgacttaaagtttcccgaatgcggccactggttttatgcagcatgatttctttgagacattgttatatacagcaatggaggtagggcagggggagggcagtgagatttcagagatggctagcttggacatgcaatagagtgggaaagtgacccaatgagaatcaattggagggggagagattggagagaggaaagataatcaacagtgagaagttcagagaaattagtttaaatgtgggaagcaatttcatcatcaggagatagcaatctatggcctgagggtgaaaatagacttgctacctgatttttgtaaataaagttttattggaacacatccatgtttattcacttaatgtattgtctccagatgctttggggctacaatttgcagtgacagagctgagttgggggcatctggtctttagtggtctgcaaaattgaagatacctattatctagccctttacagaaaaaagcttaaggttaaggagtcttggatcaaataacaggaagaataagattttcactgaaattagtgtaagtgtagataagtttctatattttggggacatctcttgtgctaacttctaatttctttacatatagacttgtggaataaatgagtacatagctaagaatattataaatgatgagaaaaaaagcaaaattccaaaacgggctacatgggaatatttatgtttaggttctcctcatagctcacaattaatttgtatatgcaattacaaactctatggactacggtcattctagaggaatattatttaagtgcagtatatgtcaatttgaaataataagttttcacgagatatgtgtattttgttttgatttttttggtatgtaaaaaccacttgtctaaagcagtttacttctgaattattttgcattttaaaagtatccagtgaatcatttttttcctatttataaatgactgattaaaataaataagacttggtgtttttccatgagacgtatttgaaaattaataaaattgttaaacttaggattaaggaaaataacattaagaatttatttggtcttctgagacattttgtaactatcctattttaaattaaatttagtacttttacaaaatctcgtttcaattaccaactcatatgaattccaaccaaatactgacttttaaaattattgaaacatccaccaaacagtacagagttattatgttcatccttcttctctggacttcatgaatctctgtcagccaaggaatgtcggtttgtttactgggtatcccatttttcctcccacacctcataggtgtgacttggatttcctcatcctcatcttggaaataggtccccccttttagggtgtttgtaagaattatatgaaacagtaagaacaaagaaatcactaggctagacgtctttcatgtgccatctaataaatttctgagaaagtttttttattgatgcttatgaaaattttattataaacttgcttttaaaaagaaatcttttatattgggttattaaattgttctaggtacatttctctaaatcttctattattttctctctgaccttccattgatttaggagaatttgccataacagtgcttatttctttttcttccttcttgattttatgagaaaggttctattgtgtggattataatagccaagacagaaagtctcaggtgaagtacaggaaaaaataaaggaataaaatataaaataagttagaaagtaaatgtatacccaaagatataaatggtagaattagagaaattagaggaagaaaacacacacacacacacacacacacacacatataagttggtatactatatatgtatgtgaatatgtatatatgtataaacacatatgaaatatgaataggaatattgggaagacatatatttgaaactatgaatattttatgccatattactccattttcaaggtattgattggttaaaacatattttatataaaacctgaaattggaagcacaaatgaccttaaataagaaattaaaattaccccaaacaatttagtaaatatttattatctgtgtactgtgctgttaggcacggggtcagtgtccccgccttcctacaatgcaagggttagtgtaatatctaaaggtatgtgacttgaaaaacgatgaagcaaaatgactggaaccttcattgagagtatgttttagagagacagagtagagttttagagagacatctgattttatagtagaaagtttattttaaactcacatataagcttttacagatacatttttatagtaaaatctcagctgctagaaaattagagtatatcagtatatgagattgctgtaggtttcgtggcactaacaaaaacacaaggatggatgaactaaaaaatgagtttgtttctctttcagacttacttctcttaaatgttgtgtagatgggagtgatggaggccttgtaggaagtctctgctcattcagggatccatagtcctgttgcccagtttttcgatcatcccctgggacgctgtcttcgtagtcacggttgaggatagctcaccagcttcatgtgtgtatcacgaccttcaggagggaggacgaagaagagagcatatctatgcccatttacgtcttaatgacgaagttggatgcgttatatccaactggccaatacttggttacatgccacatctaactgcaagggaaagtgggaactgtagtgacatttctagatagccaaattgtcccctaaactttctaatactacataaagggtgaagaaagatacatattggaggatgagcaatctttgccagagccatttttttaatgtaggaattaagattaatgtttttcaaaaaaaggcaggggttgcaatcctagtgtctgataaaacagactttagaccaacaaagatcaaaagagacaaagaaggccattacataatggtaaagggatcaattcaacaagaagagctaactatcctaaatatatatgcacccaattcaggagcacccagattcataaagcaagtccttatagacctacaaagagacttagactcccacacgttaataatgggagactttaacaccccactgacaacattagacagatcagtgagacagaatgtcaacaaggatatccaagaattgaactcagctctgcaacaagcggacctcatagacatctacagaactctccacccctaatcaacagattatacattcttctcagcaccacatcacacttattccaaaattgaccacatagttggaagttaaagcacccctcagcaaatgtaaaagaacagaaattataacaaagtgtctctcagaccacagttcaatcaaactagaactctggattaagaaactcactcaaaaccactcaactacatggaaactgaacaacctgctgctgaatgactactgggtacataacgaaatgaaggcagaaataaagatgttctttgaaaccaatgagaacaaagacacaacataccagaatctgtgggacacatttaaagcagtgtgtagagggaaatttatagcactgaatgcccacaagagaaagcaggaaagatctaaaattgacaccctaacataacaattaaaagaactagagaagcaagagcaaacacattcaaaagctagcagaaggcaagaaataactaagatcagagcccaactgaaggaaatagagacacaaaaagccctttaaaaaatcaatgaatctaggagctggttatgatcaacaaaattgatagatcgctagcaagactaataagaaaagagagaagaatcaaatagatgcaataaaaaataataaaggggatatcaccaccgatcccacagaaattcaaactaccatcagagaaaactgtaaacacctctacgcaaataaactagaaaatctagaaggaatggataaattcgtggacacatacaccctcccaagactaaaccaggaagttgaatccctgaatagaccaataacaggctctgaaattgaggcaataattaatagcctaccaaccaaaaaaagtccaggaccagatggattcacagccgaattctaccagaggtacaaggaagagctggtaccattccttctgaaactattccaatgaatagaaaaagagggaatcctccctaactcattttatgaggcaagcatcatcctgataccaaagcctggcagagacaaaacaaaaaaaagagaattttagaccaatatccttgatgaacattgatgcaaaaatcctcaataaaatactggcaatccgaatccagcagcacatcaaaaagcttatccaccattatcaagtgggcttcatccctgggatgcagggctggttcaacacacacaaatcaataaatataatgcagcatataaacagaaccaaagatagaaaccacatgattatctccatagatgcagaaaaggcctttgacaaaattcaacaaccttcatgctaaaaactctcaataaattaggtattgatgggacgtatcttaaaataataagagctatgtatgacaaacccacagccactatcatattgaatgggcaaaaactggaagcattccctttgaaaactggcacaagacagggatgccctctctcaccactcctattcaacatagtgttggaagttccggccagggcaatcaggcagaagaaggaaataaagggtattcaattaggaaaagaggaagtcaaattgtccctgtttgcagatgacatgattgtatatctagaaaaccccattgtctcagcccaaaatctacttaagctgataagcaacttcagcaaagtctcaggatacaaatcaatgtgcaaaaatcacaagcattcttatacaccaataacagacagaggcaaatcatgagtgaactccattcacaattgcttcaaagagaataaaatacctaggaatccaacttgcaagggatgtgaaggacctcttcaaggagaactacaaaccactgctcaccaaaatacaagaggacacaaacaaatggaagaacattctatgctcatggataggaagaatcaatattgtgaaaatggccatactgcccaaggtaatttatagattcaatgccatccccatcaagctaccaatgactttctacacggaattggaaaaaactactttaaagttcatatggaaccaaaaaagagcccacattgccaggtcaatcctaagccaaaagaacaaagctggaggtatcacactacctgattttaaactatactacaaggctacagtaaccaaaacagcatggtactggtatcagaatagagatatagaccaatggaacagaacaaagccctcagaaataatgccacatatctactactatctgatctttgacaaacctgagaaaaacaagcaatggggaaaggattccctatttaataaatggtgctgggaaaactggctagccatatgtagaaagctgaaactggatcccttccttacacattatacaaaaatgaattcaagatggatcaaagacttaaatgttagacctaaaaccataaaaacctagaagaaaacctaggcaatacctttcaggacataggcatgggtaaggacttcatgtccaaaacaccaaaagcaatggcaacaagagtcaaaattgacaaatgggatctaattaaaccaaggagcttctgcaaagcaaaagaaactaccatcatagtgaacaggcaacctacagaatgggagaaaatttttacaatctaatcatctggcaaagggctaatatccagaatctacaaagaagtcaaacaaatttacaagaaaaaaacaaccctatcaaaaagtgggcaaaggatatgaacagacacttctcaaaaaaggcattgatgcagccaacagacacatgaaaaaaatgctcatcatcactggccatcagagaaatgcaaatcaaaaccacaatgagataccattgcacatagttagaatggtgaacaataaaaagtcaggaaacaacaggtgctggagaggatgtggagaaataagagcacttttacactgttgatgggattgtaaactagttcaaccattgtggaagagagtgtgcaattcctcaaggatctagaactagaaataccatttgacccagccatcccattttatcccattacagtaatatacccattactgggtatattcccaaaggattaaaaatcatgctgctataaagacagatgcacacgtatgtttattgcggcactattcacaatagcaaagacttggaaccaacccaaatgtccatcgatgatagactggattaagaaaatgtggcacatatacaccatgaaatactatgcagccataaaacaggatgagttcatgtcctttgtagggacatggatgaagctggagaccatcattctcagcaagctaacgcaaggacaaaaaaccaaataccacatgttctcactcatgggtgggaattgaacaatgagaacccttggacacaggaaggggaacatcacacactgggtcccgtagtggggtggggggaggggggagggatagtattaggagatatacctgatgttaaatgacgagttaatgggtgtagcacaccatcatggcacatgtatacatatgtaacaaacctgaacgttgtgcacatgtaccctagtatttaaagtataaaaaaaaagattaatgtttttggctctagaaccttttgtttaataggctatagaatgagatttttaaaaactaaaataccccatatgtgtacgtatgatacccatttttgtcttcttaactggagcatcggaggcacaatgtagcatttctgtgagtggttctgcaatagtgaagaatgttaaatttgctgacatttaacatcaaaggcaaatcatagggattaacagaaggcgcagagttcgaatggtggacttgacacatgccttcttttagaaagaatttgttagctttattttttgctcagcttcttctgacttctttttctgtttatgtttttaaaaaactgttaaaattatgttttaaatttttgtggctacgtagtaggtgtatgtatttatggggtacatgagatgttttgatacagacatgcagtgtgaaataaggacatcatggataatggaggatttaccgggtctgtactaccatctgggctgtgtcccattgctgtctttctggtattctggtatcttcctcagtgtgatatcagtgtctgtgacttgcgtgcattatttagacttgacatttgatttcctactcagcaacgtaatgaagacgaggtattttcctagtagcttccaaaccattgattgaatttgtggaaattaagaaaaaatacactttgacttatttttaagaagttacgtgagggccggacaccgtggctcacacctgtaatcccagcactttgggaggctgaggtgggcggatgacctgaggtcaggagtttgagaccagcctggccaacgtgttgaaaccctgtctctattaaaaatataaaaattagcccggtgtggtggcttgtgcctgtaatcccagctactcgggaggctgaggcaggagaatggcttgaacccagaagggagaggctgcagtgagccgagatcccaccattgcactccagcctgggcaggaagagcaatactcaatctcaaaaaaacagaaaaaaaaaaagttatattatatttttttaaaagtgctgttgcttagactcttaattcattttcttcatttaaagagattgatcatattgggataaagacgtgttttggaatccaaacaacctggttttaagtcccagaaccaccagttacctttgtgacctttggcaagtcatctaatttttctatttccatttcctcatcctactaatttctatcaccctgatctgttgtagtgaaaaatgatataatgcgtgttaagtgattagcaaattgactgacactaagtactcaataaataatggcagctgttgttattgctgttgtatatgcggtagtagttgtatttgttgttgattgttgccctaacagcaggccatgatttttcctaaatcctcattagggcttaactttgaactcaatttcaggccctatctatattaaaaattacctatttaatagtgtcattaggttgaatgtcatgtacagtgttgcatgatggattaatttctcataaatcacttcagtaatcatttttatgctttgaatagtaccttggtttacgtgttatatctgtgagaaaacacagcggaaatgtgtcaagaatatttccaggtactaatcctggttgttcagaaatgctcttctgttatttagtgaaagaaccgcttggttatccctctgtaatcctttatcttggaaataatcttttactgaggggtaaaaagattatagaatacaccaaaaaattcaccatccatgcattgacttagactccatgaaaaagaagtatgatacatttaaatgaactgagaatgataaaatttgcaaatgttcttgaagcatttatgcattcaagaccaataaaactgtttttgatccaggttaacagtcgtatcatactttaaggctgaatttagataaattgccaaaatccattttatcagtgatataaaactgctcagtgatagactgtgccctctcatagtgtcccagctattttttctaagagctttgtggtttgctgggctgctggtttcactacctacatgtagccacttgattacttatctcagtttgaattgcccaaatcatgcttccagaaacacacagagctcattcacctgtttccccataaaaatcatttatcatttcaatgaactttggcccccaaacacaggcattgcagagcatttcttgggatctagaatgtgcttagcattttatatgcactatctcatctaatctttccagcagccttacgtacgtatatttttatttttcttgttttatagatggggtaactgagatgcagagaggttaaatacccaagatcagacagatagtaaactggattttaaaatatatttatatattcagaagtatcaaggctattgctgtatacttcattagaaccatttctagtcagagaaattctacgagtagaaattatgactagaaattgtctccagaaatgagtgtctagagatttttctagacattgctggactaaaacagtcatttatcatccctgatttttttacctttctcctttctgctctttcaccttttttttttttttttttttttttaaaagagacggagtcttgctgttttgcccaggccggagtgcagtggcgctttctcggctcactgcaagctccgcctcccgggttcacgcctttctcctcctacctcagcctcccgagtaactgggactacaggcgccgccaccgcgcccggctaattttttgtatttttagtagagacggggtttaaccatgttagcgaagatggtctcgatctcctgacctcgtgatccgcctgcctcagcctcccaaagtgctgggattacaggtctgagccaccgcacccggcctcttccaccttttttaatgagcgatgtcttcaaggaacataggtgacaatatctaatacttcctaaatctaacaggcagtaattaagcctctgaagtctgtggataacgttgaataaatttgagtgtactcaattttgggggaaaaaaaaaaaacaaaaacagaatcgtttcatccattcactgtcatgcctctcatcgtaatcattatttgcccaatgtactgaagagaaacataaactactgtgataaagacaaaataggattgaagcataggaaaaataattagttccagttgatgatactggcatcttcattcatgaaacgattggggtctatctttcttataaatagatctataaagaacaaaaaccaactttcctagaaaatctcttcatttgatgccatgacatgtatgaagtgatctccaatcttaggtacaatgtaaaattctgtgatgataaaaacatattttggggtgctgaaacaaagcataagccactttttatatctttatttccaaattctcagattaaacatcgttttattttaaaatgtcttttattccaaggtctctatggaaaatatacaaatgtagaattcaggcaaatttcttttttcgtcggtttgcttagtctgaaattctagagccatttccaattttgttttacaaactgcagaaaaaagtttaatctcaccttagaacatatatacatatacatatcaaaataaacccatatgcacatctgaaacaaaaattgagacaataattgttagtattatataagtgacacagactactatttttctgtttaattttaaaatattcctagtcataacctactaacatgattttatgaaccatgaatggattctgacttacaatttgaaaaacaatagtctatctagacaaataattactcagatcttaaattcaaattttgattataattctgtatatatatagttgaattgatggatataaatataaaattttgcatagcttattcagatttgaatttatctttaagaaggctgtctttgaaatgtttttgttttatgcacatcctcagacaaaatatttaggttcagaatttgagtactagatgtcatgtccttgagtataagtatacaccttttaatattttcttccaaaattcaatcctgtgtaaatatcaataaatcataaagtgtttaatattttgattcaaattgcacagtgtaaagtattgtgttacttgagtattagtgctgtttacaatgcttcgtttggagaagattatttgaactcaagatagttaatgatttttaagaactcttaaatacgagctaggttaaggttcagatttcaaaaagagttaaataatgtttgctcttacacatttttgggggcgtattttcgacaataattttccatctcctgaaacctgaacagtgacttaagaaggtaatcttggggcaatttatgcttcaaaacacttcttatatatgcagaggaatttgataataattacagccgtaacatactttatttagttgttatacaaggtcactctgtgaagtgcattatgcactctttaattcttaccacaatcttattatggaagtattattgttcccattttacagaagcagaaactaaggcttatgcagggctaggtaactcccaaagtcacaagattccctttctttctatatcatcaatttcagcataagtggttggttcatataggaacataacaggagtaggaaaggatatgatagggtttcttggtcgtttgtattttcttgaaaaaattgccttcttgctgcatttgaagcagggtctggttcagataggaagcattatctcccagggctgccagcaaccttgtttactcagttatagacataacacacttacgccatattctttgaatcttactaaacttactgtgagctcaccagacttctgtgcttctagggcattgaaaatgctatatgcaaataggacagatacacatattataccacctgtctcctctgcgcatgtgcatccttcattgcacataggacttcacttctaaaacacaaattcaaaaataaaattatttacaatttcaggatagtatcagcagataatagaggcatgtgtttcttctgcgctcagggccctgtgcaactgctcaggttgcacaaacgtgaagctggttccacctgcgcacatctctcaggctgcctttatatcattttcccccttaatgctgactttgatagttattattaatagtatttagagacggaagagatacaccatggaagttgttctaacccctaagaccttcagaaattgccttactgttagacaagggttccatgcaaatagccctttcagtgcacttaccctctttgatatgatgaagttcggtgattttgacttaccaggatgacctttctctgccacttttatagaaactggaaaaagagtgcatcatttgatgaaaatgtcattgcaataactgccactatgccttgtcatctcgaaggacttaacagttggggaaatttaaaatattgaattttcaaaatttgagcatttatcagaagagcacaagtaagttggtgctggcagcttagtgggttaattcccagaactgagaaggacaggaaatgtagcacatacacaccaggggaaagccaccaaaggttgaattttctctgggtgagattatgaaatcccccaaacagcttctgttgttctacactgctttttgattcctttacaaaaccctgtttgttagggggccccgtgcttgcttgcaatatttgtggaatgcagaagattcttctacaaatatttctccaatatttgtttgttctgctcacctccgtaaatagtatgcctatgtccttgacctcagcaaagtccctcttgagcatgttctcaggatttttgaagcccggcgacctgcaaggagtacactcctcccaaagcaaaacctcctgcaaacttagtagtttactcaaatttttgcccttgataaatgcctttaggttaaagcagcagacatgtagtttatcccaagaagcctctcctgtcacttgagtgtatggttcctatagcatgcaaatctctgcaaacatatggccaggtttacagctcatgtaaactaccccgtctctattacttggcttcagatggggagaagttagagccacgcagagcgctccagcctctccagaggaagcctttctcaccagatttttctaatcgacctccttgcttgctcttacacacctttaagctagatattggattaagggttgtgagaccaattttgtgatcacttcttagcaattttttaacaggtaccctggatcttctctttagaattatggatgcttcgtacactttgctcttggctttagggtccagacggaaattccaagacaaccatttgcattctcacttaatatcctgctaattaaattgggtaaagcatacttcatattttagttcttctaagataatgtcttactatttaaatcgtggccttctggaaataaaggctaaatcacagaagtcattatgctgttagaaattttagatgggtgggtgaggtattttttttctttctaaattttgccttcctttcccctacctccttgttttcttactgatgcctttactggtctgtaaatatttggaaatatttcattacctagggcctctcaggaagagatatttcctttaatgccattgcagaggtatgtaaatataattctgataatgtatatgtaagttattataaataagaaatgaggaaagttcctacagatcaatatttatagcatttaaaaagcaacatgaggtgatatactaatttactccttccagtaatctagaagagctttaatacaatattaatttggtgtggattttgaccgctatttgaaaattgatgtatgcatgaggaagttaaaatgaaaactccctattgtctgtatctgctgttcctgtgtttgataatgccagtggacagtcctagcattttaaatatttcattcgattcatcatttaatgtactggaacaatctgcaaagacattaattgtgtaacacccaatttattttattgtgcagcatttggaagctcctgaagacaagtcatttggcagttcattgatggagagtgaagtaaacctggaccgttatcaaacagctttagaagaagtattatcgtggcttctttctgctgaggacacattgcaagcacaaggagagatttctaatgatgtggaagtggtgaaagaccagtttcatactcatgaggtaaactaaaacgttaatttacaaaacaaaacatatgacttgttataatggcaagtcatcctttttcctcaattactctcttacatccttgtattttggaaatttagttactatgatgtgcttgggattccaacagtcagattttgaagttttcttttggagagcaaccattgaaggcatttctacctgatcggccaacaggaatacgaaagcccaacttctttctcttgtgtcaaggcagtgctgaggcattacttacattcctgagttgatgtatggtattgggcttaacttctctcagtgggagacttttcctgagatgatacactcgtttggcttctttcccttccctgtcctttttcctccatcttcaactcccttgcggaacttcctgggagctcttccttaataaatcacttgcactgaagtccttatctcggggcctgcttctgaagaacttgacttaagataattttccttaattcatattaaaagtggttttgggattctgcaaatacaaattaaattccttttactgggaatataaatctaaatgggccacaagtttaaaactgcaaacaaataaaactcaaaaccacaccgatttacctagagttctaattacaattgttaacttccttctttgtcaggggtacatgatggatttgacagcccatcagggccgggttggtaatattctacaattgggaagtaagctgattggaacaggaaaattatcagaagatgaagaaactgaagtacaagagcagatgaatctcctaaattcaagatgggaatgcctcagggtagctagcatggaaaaacaaagcaagtaagtccttatttgtttttaattaagaagactaacaagttttggaagcttgtgattattttgatgtggtttgatggttaagttacgattctcagtttgttcccaaggcacacagctttctttcaagggagactggttggattttcatagaaataacattttggttttcacttttgtaactaaaagagcagatgttagatagatgcactgttatctacagaactatgttttaagatttgccaaaattctgtcatagttattattttctaggttttcctccaaacattaaaatgtcactataaaaggcacagaagcatgcacaggagattgtgtacataaaatcacctattagctatagttgacacgaaacttctcttctgaagaaaaagcccttgaaaatattaaagagttactcatctatatatggaaatcctcttgaaaaacattattcaaacgttttgggaaattcttattaaaatacagtatggctatgaattatcttaagaatatatattgacttaataaaaaagaggatttgagacatttctgaaaaatgacatatttcttataaaggtaacaagcagatctcatcattctggatatgtgttttgatttatattgttaggtgtgtatattcatgtaaagcctatcaagacaagatagatttatttttaaatgaaaagaaatgaagtgccaactgtggatttgaatacattaagtgaaaaaaattgtccaaatgccttaagtttatttaactattatttatgaagttcaaaagcgttaaaaaaaaaaaaggaccaaggaaactcattagatatgctagaaggattggtattccagtactaaattatagtgtgaaattatggaggggaaaaacacatttttaagctcaggccttttgaaagaataaataaggtacatgtaagatagaggtttcataactatatatgtattccaagccaggagatactaatctatgcatattgatattattcgcctgctgtgatcgtggtgatgattgtcactacccctagatgtgagaggtacaataatcatattataactgttgagtctgcccactccccagtgtttaccaggtccactaatttactccatctattatcgatattaagatataagctgccttctgtggtcatatgccaacattcttcaggttagaacttctatttgcagtgatctgtggaacttaaagcaacctcaaacaaaattagaaagttttgaaaatccaaccacctctttactgtccttgccataatagccaccagtgtcttctcctttgtgcactctaggtttccatcctctcctggaggctaaatgctctcatttttcttacactccccattttcaataaaactaacaatatggcattaattattcatactaatcagttaattaattgctgtgtgaaattgagttgcaagaaaatatgaattcctcctggaattaaaattgcaactttttctttgcttatctgaaacataaaaaaagtcttttatctgtgattctaacatttaaaaagatgttcattcaaaaattccccccttcaagggatgtctgccattaagtgaaggatgacagacacctagacttctgtgcgtgtaatttcctcatccccatcccactagagaatggaaatgctaaaatggcagtattaccacctagctgagattgacataaaaaattagtttgtccttagggaagattcaagagcttttgtacgtgttacagcttttagaataattattaagaaggcaaggagagccttctagctggtatagcttttgctaaaacatctcacagagtttttaaaatgagacacgtacatgtaaccacttctatcacatagacttttctggaaaattccttaaaaatgaatatacaaagcattatttgagcaacacaaattcagaaataatatgagagtttataaataacagtcttccttgccactttgactatgtatgtgttcgtgcataaaacctattaaattctaatgtgataagccattatgtaagctttgctgaacctgatttttgaaagattttgtgagaggaaacaaaaaacgtgattatgaaaagagggtattgtcattatttttaaaaaactaatctaggttttacttaatgcttcaaataaattataacctgttcagtttccattatcatggtcatgagaatggattatctccaatgattagcttcaacttggagcattacctattttttttctaaatatatgattacttcagagtagaagattactagtaaacaaaaatggattcatcgatacttcttttctctctctacctaagacagggtttggatagatccagtcggaagccattatttcctgcctaagccttggtttagcgattagagaaatgataattaacatttgtctagtcatattaagtatatccaaagctatgctataatttctaagttgatataacaaaagttaaaaacttcttgtaaatacagataagcttatcactaaaatctatgaacatttacacttagcaattattaatcctatctaccaacatacttactattaggttgctgcaaaagtaatcatgtttttttccattgtaagtaatgggaaaaactgtaattacttttgtaccaacctaatagcaacatcaaattatatttgatatatagtcattgtgagatatatatatatatatatatatatatatacgtataaaatacacatatatctctctatatgaacaaatattaatggaatacattatcaaaaacaattaatggcactggagactcaataatgatcatacaaggtctggccccagatctcatgaaacatattctgtagaggctggcagccaagaaaaaaaagaacacaagaaaaataccggataggaatatagtttttgaagagattaaaatgtaatgtgatagagaatggttgaggggaggctactttagactttgtgatccaggtaagactttgaaggttggtaccatttagtttgagatttgaatgacaagaaggtaccactatttgcagatcacaaggaagtgtggttcacggattaggaacagctaatgcaaaggcccaaaaatagggacagtttggcttgctggaggaaccaaaaggccagggggactgtagagttgcagggtggtaagttagatggctgaggtctgagatggggttgaaatataggtaggagactgattacatattgtagtgtcagtcagggctttgaataagggctttgaattctagactaagtgcaagacaaagccatcagattttatgtaggtgagagataggtcaagaaaacctatcaggaaggccactggaggaagagaggacagttattaggccagtgaagttggccagttaagacacagtagtgtcttagaccagctggtagttgtgataaaagtatactttactatcttagccatttagttattttaaaaaccacttctctgtttagttttagttcctatttttttttccttttgacagtaaaagtgctttttcctttggaaatagactgcttcaatttgtgcccacagttactattattcaagttgcatctaggaaataatatttatcccataaaccatcaacaattatgcaaaacaagaaatattaaaaatacaaagataatagcgtgccctgatttctgccttacataaaatcctctccagtttgcctaaggaataagggcttgctttctcaaacacttatttatgtgaactggggcaatatacttttcttttctgttctctactttatagttttgtaaaacagcaatagtgtcatgaggctgacatacctctgaaagatactagatgagatagggtataaaaagttagtttgtgaatgcaaaattattataaaatgtgaagaaagataactgtgataaataagatgatgagctgtcagttaactattttaccataccatgtcactttttatatgtaatttgatattttctatatgaagtattatataattttatatataattatatttcatatattttgtataataacttatatataattttttaacttttaaaaaaattttgcagggaatgaggtcttgttatgtttcccaggctagtctcaagctcctggcctcaagtgatcctctcccaccttggcctcccaaagtactagtattacagacctgagctaccaaacctgaccctcatagatgttttttactttttttctccagccttttctaattgcctcagtcatttttttttcccaaagagtatagctgtggttattttgtatggggataagggagcatgagcaggatgattagaaatacatttgcagttattttttcacaatggcaacatttaaaaatatgcttacaaaggaatgtcaggaaagataaccatacagatacttcctcctttctttctccttcataaccacactctcatttgattctttccttgctattgtattttccctccaattctgttgcttttatggacataaatttctgatgaggtaaaagctaatacaataaagaagtttattaacacatctccagtcacaaatgagtttggcacgtgccgatactggtcaattacaaaactttaccaatgtttatatgatttaaatgagaaaactaagtgccattcctttcataatgtagtgtttaaaacaagagaatattgatgtggttttgttagaaccccttaagaggagtaagccaatgattttttttttaatgctgtggaatacacttgggatggtaggaggtaaggaattcggaagaaaaacacacaacttccaactgtggaagtgcaagaagacaactggcacagggaaaacagaagattttcttctctatgaataaactaattaatttgattgaaaaatgcaacctgcagagagcaaaaaagatttactgacatttttataaggactcaaagttaagcacagcaagttccatcaacttttctgataattgtagttaggacatgcaggcagaaactaaaacttctgtgacggtaagggaaaaaaatgaaagcaagtcaggaggccaagtgaagttgtgttttttggtttatatcagcaggaggagagatatgaatagtatctgggtagatacacaagccataatatggaaaataattgtgaatcaccatcaatgctttgactggacagaaaaatacatctaacaaatatggctcatctctttttttttcccccaagtgtctatttgactctggaaataagatggcatatgtgagagtggatagagaaaaggaggtgctgaacaaatgagtgggttattttctcccaagtgcagtgaagtttgcgtatgtgaatatatgaatgaatagatgaacaactaaattaagttattcaggtaattccaatcttggaattgaattcgttgcagtaaatactttggaggtgcacaatctcaaactcctaattgtgattttatttcacaatttggtaagttcattgatttttctgttttacttcttccagtaatgttaagcaatagtaacttgcagatcaaggtggtgtaggaccagtagcatcagcgtcacctgagaacttgttaaaaatgcagactctcagctctcattctgatatatacagaatcagaattgtgcagtttagcaatatcccaggtgatccctgatcagtttaagtttgagaagcactgatctaactgaaattaagacagagtagaaatctcaacttctttgtaaacctctacttagatatcttctgttcctatttttctatcaagtgacgtgggccaaatattttaattactttctcaggagctctaaaaatggtgctgatatttcattcagtcctcatatgttgatatcataccccatgggtgattaagcagtagcaagattctggtgcaataatatataacagacaatatatgagtgttgatgagtattgataattaagctattggactaataagaagtaggaattatttatagatgataacgtgacattcggttaggttgcacatggattatggtcataataatttttctgtcaataattaaaaatgtgataatgcagctaaatgtggacatctcttgtactaataatacaatgcatgtgactcatagtttaaattacaggaaagctaaatttctggaattcacagaaatgagagagccgtatcttcaaaaacaatgctttctcacaaagataaataatgctgatatggtttggctcatcttgaattgtagttctcataatccccatgtgttgtgggagggacctggtggaaggtaattgaatcatgggagtgtaaccctcatgctgttctcatgatagtgagtgagttctcacaagatctgatggttttataaggggcctttccccttttgcttggcccttcttcctgctgccatgtgaagaaggacatgtttgcttccccttccatcatgattttttctgaggcctccccagccatgccgaactgtgagtcaattaaacttgttttctttataaattatccagtctctattatgtctttaattagcagcgtgagaacagactagtacagtacattggtaccgcagagagtggggtgctgctataaagatacccgaacacgtggaagtgactttggaactgggtaacagccaggggttggaacaattcaaattaaactaatagactatctcagagagcagatttaatagaagttgacattttaatcttagtacaaaaattcccaatcagaaatatcaaaactatgtcttgttcataattaagttatactacttatacattgaagaaatatttattgagtgtgtagtatgtgccaggcactgtgccagatgctatgtagtggcaaaatttttgaagttgagagtgagcttctatttccacataaatgaatagaatttcagagtgtcaacattacctattcttactagagataatttaaacagtcttccaaacgtgatatattcatatttgtccttggctcctgatgacatctgccaatttctttattttctttaaaagcatttaatcaggaagattgatttgagggttgccataatgtatttgccacaagaatctttttctttttctttttcttttttttttgagacagagtctccctgtctcccaggctggagtgcagtggcgctatctcggctcactgcaagctccgccccccgggttcacgccattctcctggttcagcctccccagtagttgggactacaggtgcccgccaccacgctcggctaactttttgtatttttagtagagacggggtttcaccatgttattcaggatggtctcgacctcctgacctcgtgatccacctgccttagcctcctcagcctcagtgctgggattacaggcatgagccaccacgcctggccaagaatcttttgcatccagccacgcagcttctttatgttattgttactaaactgaatttatgttttcaaaatgaaaataaatgtgtttgcatttgaactttaatgttgcctcggatagttgaaaaatattaataattaaactgttcagctatatggatggaggacaaaaatggatcaggatttgaaaacaatgacacattttcgattttctcatagaattcagtataaaaacaatactatttctcacattccattaagtaggaaaataaatgttagtgcatgtttaattttgtgaaaaactggaacattttccttcatttctagttgttggatggggaactttatattaggttctttctgaactatttactgtgaggttgtaatttaaagtttgacctccaagatcaggttgcagggtgcagtataataactatggcaattagtgggaatttttgaaaatgatacatgacatgctctccttggcttctttcctagcccaagatgtcagcatacttcgtgttgggaaagaaggtgctgtaaagaggagaatgaacacattagttttagggggataaaaactgtataattttgtcagaccttgcctcacttcattctccaatggaaactactatattagtgcctaagatttatacacaccgtgacaccatgcagtgtcaggctttgcagctgagtctagtaaggaataccagaatttggaggaaagcagatctagttactgaggcaagtaggtaaactaggccagtagggtttctacagcttcacagatgctgagggtacccattcagaaagttagcatgagaactagaggacaatagcgatggatgtacttgtggtaaaggtgatgagatagtgaaaacagtgacagctgaagtcttacacatttgagggggtaattggttctgtttggattctggctttaaagcttatatttcacaggccacttattgaactttgataaacgttataaatcttgggagttgaaaaatactaatatgcttcctatggaccattcattattgccatgcaacaacaacaaaaaactatgtgcatatgtttgtacatgcactactcaagcttttcttttaaatgaatgttgcttttctatattaaaacatgtttgccatttcttggattataatatatcatgatttctgattcctatatttaatgatacaccatacattttaaaaatatctagtcattttatatggtcaccatatatttgagggaaaatgagtctcgaagtttattgtggaggaggtggagaaaaatcgccaaacagaagcctccagtaattatccctgttgcaggaacatcaaattgaacaactgtccacactagaaaagcaccttcataagagtgaaaaattaggtgcatgatcgtagtacctggtttttgggttgtatcacagaaagaggcacagaagagggtagtaaaggcaatattctatcacctataccagctctccctcatccatggcagcagtcacatggcatgaagagagagtctatgtgcttgcagaagggagattgcagtgattataggactttgcattgaaaatcagtgctgccctgtcacagtggaaaccgacaaagaacagaactcagccaaatcccgcagagggagcatttagatgaaccctagacagggaagaatcatccatcccagtgtttggaacctgagttccggcaagccttgtcatcatggattagagtgctctgtggttctaaataaacttcaaaggtagtctaggccacaaggactgcagttcctttgcaagtcctggtgctgtgccgggctcagagtcagtggacttgggatacatacaacctagtgagacatccgctggggcagctaagggactgcttgtgcttcccttcccccaaccccaggcagcacagctcacagctccaggaaagactccttccttccgcttatgaagaagagaggagacaagaaagagaactttgtcttgctgcttggataccagctcagacatacaataggatagggcaccaggcagagtcttgaggtccccattccaggccctagctcacagataacatttctgaacacaccctgggccagaagagagcctgtcaccttgaagagaaggaccccgtcctggcagaattcatgacatgctgaccaaagggacctagggccctgaataatcagcagctgtagccaggcagtacttgctgtgggtattgggtgagactcagagctgtgatggtttcaggtgtgacccagtacattcccagctgtggtggctacagggagagaatccttctgcttcaggaaaggagaggtgagagtaaaggggactttggcttgcagcttgggttccagtttgaccacagtggggcagagcatcaagtgggctcctagggtccctgattccagagtttggctcctggattccattttcttactgccctgaagggagagactcaggactgacagcattcaccacaggctggccaaagtggccttggcccttgagtgaacattggacctcagacagtactctctttggttcagtagtcgtcgtggccatgaggagagacatctctgtttgtggaaaggggagagaagagagggaaggactttatcttttgggtggggtgccagcttagccacagtagaatagagcaccaggtagatttcttaggttcttgagttgatatagtttggacatgtgtgcctgctcaaatctcacgttgaattgtagtaatctgcagtgtttgaggtagggcctagtgggagctcattggatcatgggggcaaatttttcataattggttgctactgtccttgcaatagtgagtaaattcttgcaagatctggttgtttaaaagcgtggcaccctccctctcactcttgctcctgctgtggccatgtgatgtacctgttcctccttcaccttctgccataattgtaagtttcctgaggcctccccagcagctgagcagatgccagcatcatatttcctgtacagcctgtagaactgtgagccaattaagcgtcttttctttataaattactcagtctcaggtatttcttgatagcaatgcgagagtggcctagtacagaaaattgttaccaagaagtggggctttgctgtcaagatacttgaaaatgtagaagctgctttgaaattgggtaacagacagaagttggatgagtttggagggctcagaagaagacagatgagggaaaatttggaatgtcttagagactggttaaatgattgttaccaaagtgctgatactgatatgcacagtgaagtccaagctgtcgaggtctcagatggaaagaatgaacttattggcaactggagtaaatgacatgtttgttatcccttagcaaagaagttggctgtattatgtccatgctctagatatctgtgaaagtttgaacttgagagtgatgatctcgtgtgtctgacggaatgaatttctaagcagcaaaatgttcaagacgttgtgtggccacttctaacaacctactctctgatgcaggagcaaagaaataagatggaatatttattattttattttattgtactttaagttctgagatacatgtgcagaacgtgcaggttttttacatatttatacatgtatatttaaaaggaaagcagaccataaaggttttcaaaatttgcaacatggatatgtggtagaaaataaaagcccattttcaggagaactcaagaaggcttctgagcaaccacttgctagaaaaatttgtatacctacaaagaaggcaagtgctgatagccaagacaatggggaaaaaggcctggaaggcatttcagagatctaaaaggcagcccctcccattatagatccggaggcctaagaggacagaatggtttcctgggccaggcccagggtcccagctgccctgttcaacctcgtacactgtgcccccgccccaacccctcccccccgcacccagcgtcctggccactgtagctccagctgtggctcagagtggcccaagtacagcttgggccacagctccagcgggtacaagccataagcctgcaggtgcacagagtgcaagagttgaggcttgggaacatccatctagattttagaggttgtatggaaaagcctgggtttccaggcagaagcctgctccaggggcagaaccctcacagagaacttctcctggggcaatgcagagggaaaatgtgggctttgatcccccacacgtagtccccactggggcattgcctagtggacctgtaagaagagggccactgtcctccagactccagaatggtagatccactgacagcttgacccttgtatctggaaatgaaacacacactcagcaccagaccataagagcagctttggaagctgaaccctagaaagccacaaagttggagtctgcccaaggccttgggagcacaccactcccaccagtttaccctggatgtaggacatggagtcaaagcagataattttggagttttaagatttaatgactaccctgctgggtttcagacttgcatgagacctttcttttgaccaatttcacccttttggaataggagtgttgactcaatgcttataatcccattgtatcttggaagtaactaattggtttttgattttacgggctcataggtagaagaaacttaccttgtctcagatgagactccggacttttgagttaattctggaataagtaaagaccttgggggactgtttggaagacatgattgtatgtttaaatgtgagaaggacttgagatttgggaggggccaggatggaatagtatggtttggatgtatgttcttgcccagatctcacattgaattacaatcctcactgtcagaggtggggcctgggtgggagccgaatgaatcatggcgttgaatttctcatgaatggtttagcactatcctcttagtgctgttttcatgatagtgggtgaattcttgtcagatccagttggttaaaagtgtgtggtaccctcccactcacctcttccctggccgtgtgacatgactgctcctccttcgcaatttgccatgattgtaaatctcctgaggcctccgcagaagcagagcagatgccagcatcatgtctcagggacaacctgcagaaccatgagccatttaagcctcttttcttcataaattacccagtatcagatatttctttatagcattgtgagaatggcctaatacatgaccccaggccctggcttacatataggatcttgcaaacccaccagggaaaaattgctaccctgaagtgaaaaacacaagcttcattggatttgccacctgccgattgtagagtccttgggccctgagtgaatgtaggtgatagccagtcagtggtcagtgtgggccttgatcaagacccagtgttgtactggctttaggagtgacccaacacaatcctagtcgtggtagctacaggggtgcttgtgtcacctctcctttagctccaggcagctcatcacagagagagactctctttgttgaggggaaggaaagagaaaaagattatctaccaggtaatacaggggattttcctgaatcttcccaaagatcaccaaggcagtacgtttaacagtctgcaagagtcacagcattactgggcttgggtgcaccccagtgcatatatggctgcagtgaccaaaggaataaatcacaacacccaagaacctttaaatacctggaaagccctcctgagaagtatggatacaaacaagccgatactgcaaagactacaataaataccaaagtcttcaatgcccagacattgatgaacatccggaagcatcaagaccatccaagaaaacatgatctcaccaactgaactaaataaggcatcgctgaccaatcttggagagacagatatgtgacctttcagacagagaattccaaatggctgatttgaggatgctcaataaaatccaagatagtacagagaaggaattcagaatcctacacataaatttaacaaagggattgaaataaaaagaatcgaacaaaaattctggagttgaaagatttaactgacatactgaagaatgcgtcagagacgagtaacagaagaattgatcaagcaggagaaagaattagcttgaagacaagctatttgtaaatacagtcagaggagacaaaaaagtcctaaaaagtttattgaagagggtaataacacagaacttcccccacctagagagagagattaaaattcaagtacaagaagataatagaacaccaaggagatataatataaataagactacctcagggcatttaaaaatcaaacttccaaaggtcaaggataaagaaaagatcttaaaagcggtaatcatataaaaaaaaaaatcacatagaaatagctccagtatgtctggcagcacaattttcagtggaaaacttccaggccaggagagtggcatgatacatttaaagtgctgaaggaaaagacttttattctagaatagtatatctatgaaaatcctcttcatacttgaaggagaaatgaagactttctaagacaaagaaaagctgacagatttcattaacaccaaaccttttctacaagaaatggtaaagggcgttcttcaatcttaaagaaaaggatgttaatgagcaatgagtcatcatctgaagtaacaaaactcactggtgatagtaaggtttgttactattctgttacaaagagaatattataacactgtgattatgatgtctcaactacccatatcttgagtaaaaagactaaaagacgaacctatcaaaaataactgcaacaacttttcaagacatagacactataataagatataaatagaaacaacaaaaagagtggggggatgaagttaaagtgtagcattttttttttttttagttttctctttgcttatttgtttatgcaaccagtgttgtcatgaatttcaaataatggattataacttattctttacaaacctcatagttaccacaaatcaaataatgtactcaggtacataaaaattaataagaatgtataacatatgaccagagaaaattactttcattaatagtaagacaggaaggaaagagagaatgaagagaaggccacaaaacaaccagaaaggaaatagcaaaatgggaagtgtttaagtccttaacgtaccaatgataacatggaatgtaaattgactaaactatccaatctaaatacattgagtgacagaatggataaaagaatatacaagacacaataatctgttacttacaagaaacacacttgaccaataaagataaagatagactgaaaataaagggatggaacaagtattccatgccaatcgaaaccaaaaaagaacaggattagctattcttttatcagacaaaataggtttcaagacaaaaactataaaaagggacaacgccggtcattgtagaatgataaaggggtcaattcagcaagaggacataacaattgtaaataaatatgtacccaacattggaacacccagacgtataaatcaaatattattagagttagagagatagaccccaaaacagtaatagccggtgatttcaattccccattttcagcagtggccagatagatcatccagacataaaatcaacaaagaaacatcagacttattatgcagtgtagaccaatttgaactaatagatatttacagaacattttatccaacagctgcagagtacatattcttcttctcagcacatggataattttcaaggacaagccatatgttctgccacgaaacaagtcttagaaaattcaaaaatcaaaataacataaattagcttttctgatcacaactgaatatatcaagatatcagtaggaagaattttggaaactatagagacacatggaaattaaacaatatgctcttgaattatcagtgggtcaaagaagaagttaagaaggaaactatagaatttcttgaaacgaatgaaaaaggaaacgcaatgtaaccaaaacctatgggaagcagtgaaagcagtactatgaggaaagtttataggtataaatacctacatcaaaaaagcagaagaactttcaaataattgaatgatacaccttaaagagctagaaaagaaggagcaaaccaaacccaaaattagtatgagaaaataaatattacagtaaggaacagagctgaaatacattaaagtacaacaaaatgatacaaaagatcaacaaaacaaaaagaaggtttttttgaaagggttgacaaaaatgacaagtcttaagcttgactaagaaagaatgagatccagtcacttacaacaacatggatggaactggaggacgttatgttgattaaaataagcccggcacagaaaaacaaactttgcatgttctcacttacttgtgagagcttaaaaaaaaaaaaaaaaaaaaaaaaaaaaaaaaaaaaattaaaacaactgaactcatggagatagagactagaatgatggttaccagaggatgggaatgctagtgggtcgggggcagtggggatcattaatgggtacaaaaatatagttagattgaatgaatgtgatgtagtatttgatagcacgacaggatgattactgtcaaacataatttgttgtacgttttaaaataacaaaaagtataattggaatgtttgtcacataaagaaatgataagtgctcgaggtgatggataccctattaaccctaatgtcatattatgcctgtatgcctgtatgaatatgtctcttgtatcccataaatataaacacatactatatacccaaaaaaataaaaatttaaaaaatagggtattgtggtttctatcattaaagtaaacatcatgctaagaacaattgtctcaagagtaacaactgtaattttcgttttggtgaaaataataaaattattaatgacaatctctgtataaaattccaccaaatgaacttctgttttctatttttttaatatttataatcagtgccataaatgactttataatagatataaagttaatctctaaaaagttaattttagttcaggcaatattgcatgattgtgaagcaggccccggagccaaactacctgagttcccactttgtcaccttcccttgtttgcgttttgacccaagtaagcctttgtttccccacctgtaaattggggctaatatcagttgctgaatcaataggattaattacaataatacctctttttttctgacacacaattattattttgtatttaaaaattatatttaaaagccccaaattctacaagatcaaaattactctttagtaagtcttcttttttatttgtaatttctgggggtacataatagatattttagtacttgtggaagtcatttataaataagtaaacgcatgtttgtgcatcctgatcctttgtctccatgttacctctgtgcatctggttcatgttaaccctaacaagtcatgttgtctggatacagctttccaggtatttgccacttgtgaggacccaagggctaaagtaaaaattatggctgtgtcctggggcgggggggggggcggggaagaggcacaatcgttctcaaccctggatgttcattcgaattacctggttggatagttttttacagaaccaatacctgggctccattcccagatattctgattgaattgttggggaatggggctgggacgtcattttgaaaagttctctcagtgattctaatcaattagtacctttttatattaaggcattatttatataaattccactaattcacctatctgtgatagtttgaataaaagccggacttaaacattacctcaattaataactttctgttttttaacctatcttggatttcttttcttttttctctccctcttttattattattattatactttaatttctaggatgcatgtgcacaactcgcaggtttgatacataggtatacatgtgccatgttggtttgctgcacccatcagctcatttacattaggtatttctcctaatgctattccttccccagcccccaatacctttcttaatagagaatgaaacaaaagctgaaacaaagttgattttaaaaattacttatttaagcagatgacagcattctagaagcatctagttgcatataaagaattgttaagctaaaaccaaaactaatctatctataagaaccaccttgctagaatttttgagccatcgttttgttatttttatctatttttttaagacggagttttgttctttcacccaggctggagtgaagtggtgtgatctcagctcactgcaacctctgtccccccgggttcaagtgattctcctgcctcagcctcctgagtagccgggattaaaaagtgcttgccaccacgcccagctaatttttgtatttttagtagagatggggtttctattggccaggctggtcttgaactcctgacctcaggtgatccagccacctcggcctcccaaaatgctgggattacaggcctgagccactgtgcccagcctgagccatcattttgaataagtaaataaatcaattccaattttcatcagtacaattttagtttctaaatggcgtgcatttaaaagtaaaaacatgcattaaaaattaagtttctctaatttgtactggtatctttcccttaaatcatattatacaggttttatttctgacttaaatcatgtaattgtattttacatgtaagacatgtcaattgaacatcactggtagttcttttctaatctagactttcattataatacattacctccttttattaggtgtatttttttaaattgaggattgcatatatgccagtaactgtgaattctagggaattgggcctgagagcctgtcttcctaaagagctcacacctcttggtaatttgtaagttttaattgtagtcctctaggttttataaagtctatccatttatgcctttattagttagtgcctagcatatgattatgttttcataatatatgtttatacattttataatgtatttccataaagcacaaaaaatgctattaggaccatcaaatacaggctgaaattaatgaaaacatgtactattttgcatttataaatttgtatatggaaaatgaaaattttaaaaaatgctattaatgtttattgctagattgctaaacttaggatgtcattcctcatagacattggaggacaaaataaattggtatggataagtacttgcaaataaggattcacggatattggtaatctaattatctgtcggtttatagctgtgctgtccaatattgcagccgctagctatgtgtaggtaaattataattattataattaaatatagttaaaaattcagtttctgagccttactagccatacatatttcaagtgttcattattcccacctgactagtgtccattatatatgtatacctatagtgcacacatagaatatttacatcattttagtaagttctggacaacactggttaaagaataattgccttcctacattctttcttttttgttttttgaaacggcgtttcactctgtcactcaggctggagtctaatggtgcgaactcagctcactgcaacctccgcctcccgggttcaagcaattgtcctgcctcagcctcctgagtagctgggactacaggcatgtgccaccactcccggctaatttttgtatttttagtggagatggggtttcaccatgttggccaggatgctttcgaactcctgaccttgtgatccgccgcctcagcctcccaaagtgatgagattacaggcgtgagccatcgcacccagccgccttcctacattctaacagagtttctgtaaagcaaagctggcattcccattgaattcctttatgttcatacagatacgttttcatgtccgggggtgggatgacagctctcgagtaaaatcatttgaaaaatactacgtcttagaatgccatttactgcaaatgacaaaaaggccaactcaaagtgacttataccattgctccttaaaatgtgattaatggatccgaagcattgatatcccttgggcagttgttagaaatgcagaatctcaggccccaacccaggcctactgacttagaatgcatagtttgacactctccaggtgattcatatgtacattaaagtttgagaaacactgggcacaatcataaggatgtctgttatctaacaatatatcaaaaatgtcgttgacgctagagaccattaggtctgtaactctatgttgccaaagttccaagttcttacaacttatctgttttgctagcccctctctattctcagatgatctgaacgattggaagtttaccgtagcagttcctagtatcatgtcctgatatgcttttgcctatacctactgtcaggaccaactcctgccctatactactttattctaattccactccctcggctctctattgccagtcatatatgtatactccattcaccttttgcttttactttcccgtctaaatgacgacttgaaggatataaaatgaaacctggaaaaatgcaaacattttttcctatctgtgcatggtagatttttattttgtgactttgacaatttttccaaatttatttacatctttagaatgttagctggaaataagaaactcctgtctcattttcatcatgttttaaattgaactatatgaagccattttcatcaacaaagaaattgaaatatcagaaatttcatatgatctaatacaatattttgcccatgaaaaaaataaaatagtgcacagtcttgggtcacacagggtttgtgatttctatactggcttcacatgccactgtgccagctctttaacctaccactatcctcagaaataaaataacagtagctaggtgcggtggctcacgcctgtaatcccagaactttgggaggtcgaggcaggaggatagctggagaccaggagttcaagactagcctgggcaacatagggagaccacatctatacaaaaagagttaaaaatttgccagggaaggtggtgcacctgtagtctcagctactcaggaggctgaggcaggaggatcatttgggcctgggaggtcaaggcttcagtgagttatgattgtgtcactgtactcgagcctgggtaacagaatgagaccctgtctcaaaaaaaaaaaaaaaaatactagtattataaatctttaccttggcaaggttatgttaaaaaaagttgaataaatgttagccagtgtattttacaactaatattaatgacattttaacccagaggttaacctccccactccctgaagtcacccctttatttaaaccatctttgggaaaaaggacatttgtgtcatgaaggctgttaaactcaccttctgatatcagtgcctccttcaattttgcttcttcctctggttcagccttgcaatggaccactactcacttccttgctaatcacccagaaaactctggcctataattcacctgcactttactgatgctcttttcacaggcctcagtgaaggaaggaagcgtcctcttcattactagttatttcaatctttagagtttttcacatatcagtactgtaataaagcccttccttactttactgaagggcatacttgggcattctgagtctgataccctttgatacttccctgccagtgtcacataaatctatatcttctgagttttagcagtagtaactaatagatcgaacacataccttaagtagactagcagtggttttcaaataaataatattcttacctggaatgttgtcattcaaagtgtgatccatgacccagcaacattggtttcacctggaagctggttagaactgaattcttcgacccaaccccgtgaatttaaatcagaatcaccaggtgggctgtatccatatttaagtttgagaagctgtgatcaagaccccggggggcaccaaatccaaatgcctattgtagaagccagaaacataacataaggaagtgagatgagttgcgtataaaaaaggatagggagtgatgaggactacagcaaactggagagcttatactttgtatatgaagtataattggatgcgaagtataattggatgtgaagtataattgatactcaattttgtcctataggaaggaaggtttagggttgctgaatcctattaaatatgatcaagagtggtcagatttgatatttgtagctaatatctcaaattttaactactggcaaaaatttcaatttattttcaattagtatgagaccaaatccagcatatggactactatttgctaatatctagtcaaggcctgtagtaaggaaaagaaatattttctcaattaaaacatctcagaatcctttccaacaatgggatgaatgctttttgttttcgtgcttattagtatcacacctccacaatccttaggttcttctgttttcaaacttgttctgaggttaatttcatgcttcagacacatgaaatcctgctttttggagcctcaggtagaacccattctttggcagttggcagtcacacttctctctgtaagtggaggtgaagtcaggaagagaatgtaaaagtctcatgtcaaaataattcatagtaatctcctggggattggcagttgtcctcctattaatgttaatatcttggtctctgcagaatttgggtgagttgtgtttgtagaataaagttacctagagcagtaattttcaagtgtgagtatgcatcagtcacctggaagtcctgttaaaatacacatttctagacctcatcccagagtttctgattcagtaagtgtgagtcttgcacacacttctagcaagttttgaatttgcacttctagcaagtttctaggggatgggctgatgctgttggtccagggtccagtaaccacactttcagaaccactaatgaagagagaaaaagcagggctctatttggctgggagacattgatgtgactgtaccagtcattaaaatattgagccatcccgtttgcacacacccagccattctggtccctaccccaaaaatccccaaccagatgtttctgtatcccacttataaagagaaaacacctggctgggttcggggactcgcgcctataatcccagcacttttgggaggccaaggggagaggattgcttgagctaaggagttgaagaccagcctgggcaacataatgagaccttgtctctattaagagaaaaaaaaaaaaagaagataaaacacttatgtgtacatctcttcttattggtcaatctctgagtccaagtttgtaaaatgaaaccacgatagaacatgaaagattactgggtgttcaaatttcagatttggggcagagctcaagaaatctctgtggacccacagattaaggtaggctatgatactgtacaaccatcctgcaccttgtgcgatcaagctgcactggatttccggttcctctgtgatgtgacagggcctttcacaggtctttctttccgtctagaaagagtttataccttctttttcactacttctgacttcagtcttcacagttgtccagtactgcactaaaggcccccctttacagactcaattcaattgctctcatttcatagtatgatcacattataaccaactaatggcctgttgagctatatgtattatctgtggccctcacccgccatccatataaactccaagatagcaaggggctgtgttggtcttccttgcctctccatccgtagtatccaggtactcaataattgtatatttcgtaaattaatgaatgaatttttcaagtctcaactcttaggctgtgtgttctgcgaggacactgttcccaatgactgcaggtcaatttgtatcctctccttactccctcaggaatgtatataaatctaattataatggatttcttatattctaattatttttgtatttatgtctctaatagtctctaagctacttgaaattgaagataggtattttgtccattcctaacaaatatgagtttcctgcatagatatgaaactcagtaaagatttgttgaaggaaatgtctgtccaaaagcaaaaagtaaatgatgctttcaaatactagcaactttcagtttttgcttccacttaaatggatatctcatctctgttgtttctcataaaaataaaatgtctactttttgtgtttgataaatgaaagtttattctcataacttctgattgcaatgttcctcatggtaaatgtgtctctaaaatgttaaaagtcaataaatagtgcaatctaaattattgtaaacactctcaaaaggaatatgaaatgcatattggaagaaagctctgataacaaccccaatacttcggaccagctatggagccattatcttttatattttattttactggtttacttcccctgtttccctgtaattttatatgaagagtgtgagtggtatgtaacattacatacaggttccatgttggggtttaaatagcctggcattagtgtatgaggataaagatgctgatggaattttgtatccttttgttttaaatacacttatactaatttaagtattttgatagttactctgtttagcagattcatttcacttttctccttcttgctctgttcaaagaggatgaagtctagattttctgttacccaggttcctcttggcctttggttgctaaagtacttcagccaatgggaggcactggcaagagggtgaaagcagagattgtggtacttttctcttcctcttctgtttcttactgtggagtggctggaattgtgttcctcttaaactacagctactgttggacagctcttgttccatgtctctaattctcactgagctccggcaacagctctcttccttttttcttccagttccggggatgctaggtcagttgtctttgttgttaggtcctggctccttcactatcgtttattatttttcccccgacccttcacataaatgtgtaagtagtctactgagcgaaacatatttgagtgtgttctatctttcctgccaatagtatgcagcatccacacacacactcaacagacccaacttttatattttattgtttgaaatgctatcaatttctaaacattgctttttaaaccctactttaaattgacagataaaattgtatattcatcatgtacaacgtgatgcttctgagtaaatatatattgtggaacagttgaatctagctaattaacatatgcattaccttacatatttatcatttttatggtgggaatatttaacgtcctctctctctacatttttcaagagtatattttcattagctgtagtcaccatgctgtaaaatacatcacttgaatattttgactgtgactatatatcccttgaaaagtatctccatacctcccccttccccataaccacctcagcctctggtaaccactattcattccctacttctgtgggatcagctcttttagattccacatataagtgaaattaggcagtggttttctttctttactggcttatttcacttaacataatatcctccaggttcatccatgttgttgcaaatgacagtattttattcttttttatggctgaatagtattccattgtatatatgtataccacattttctttatccgttcatatgttggtggatatttggattgattccatatcttggccatgaatagtgctgcaataaaaatggtagtgcagatatttctttgacatactgatttcatttcctttgtatatataattcatagtgggattttgtatcatattgtagttttgttgttcatatttcaaggagccttcatactgttttccatgatgcctgtactgattgccattcccatttacagtgtgtaaaggttttcttttttttaattagtaatttttaacttttgcaggtacgtaatacatgcctttttcctaaatcgttatcaacatttatctttttttgttttggatagtagccatgctaacaaaagtgaggtgataatctcttcttttttcttttgacaaagatatcgttaattactattatattttaacttttaggtgcaagggtacatgtgcagttttgttacatgggtaaacttgtgtcatggaagtttattgtacagattatttcatcaccaggtataagcttagtactcattagttattttttcctaattctttccttctgccaccctccaaactccaataggccccatgtctgttgtttccctctatgtgcccatgtgttctcatcatttagctcccacttataagtgagaacgtggtgtatttggttttctgtttctgcgttattttgctaaggataatggcctccagcttcatctacgtttctgcaaagaacataatcttactctttttcatggccgcatagtattccatggtatgtgtttaccacattttctttatccagtttaccactgataagcatttaggttgattgtctttgtgattgtgaatagtgctgccacgaacatatgtgtgcatgtgtctttttggtagaatgatttatattcctttaagtgtatacacaataataggattgctgggtccaatggtagttctgttttgaggtctttgtggaatcaccacactgttttcaacaatagttgaaataatttacactcccacaaacagtgtataagtgttcccttttctttgcaagtaagctgatacctcattgtggttttaatttgcatttcccagatgattagtgctgttgagcattttttcatatctgtgttatccatttgtcccttttatgataaatgtctattttggtcttttgcctatttttaatcaggttatttgttttcttgctatggagttggttgaatttcttccatatttttatatgaacccccatcagatatatagtttgcaaatatttttctcattctattggatatctctttactctgttaatttttaattttaattttaatttttttgctgtgcagaaatttttagtttggtataagtcctcagtctatttttgcttttgttgcttgtgcttttacagtcatattcaaaagttattgcccaaataattgtgatgaagcttgtcctctatgttttctactaatagattgagagttttgagtcttaaatttaagtttttaatccatttcaaattggtttttgtatgtggcaagggataagggtctaatttcattcttctgcatgtagattcttacttttcctggtagcatttgctgaagagggtgtcctgtcctcacggtgtgttcttgacacccatgtccaaaatcagttgaatgcaaatgcattaatttattcctgggttctctattatgttccactgatcagtttttatgctaatacaatgctgtcttggttactatggcagaatttcttctagttgcgtactttgaccttagtgggaaataaaaaacatccttccaaagaaccatattattagtgtttccatattgatcgagtatcttctgttttttttattggttaacactatcatatatgggtatactaagagactcctggcaaatgcccatagttttctaatgtagtactacttgccccgcattgtattgggtgaactcagttgaccatttgtgcttaggttctgtatggtaacccctttctctgtctgtggattcagcagcatgaggagccaaacatgaacagcggtcatctcaacttctagtttaaagaaatcatttttgagtttcttataactcaaaatgttgaagaggtagttcaaaaaaaagttgaagaggtagttcacagataaggaacagaagtcacaaggtggagagagatggataaattaatattaggttaatacagatgagataattatatatagaagtatttatgggtgagtacacactcacacatccacttctttatgtcaacccagaggtcctgtaagctacaacaccctagaagcaaggagcatacctagcaacaggatcttgggtttcagtaacattctttaaagaaaaaaaaaaaaaaaaaaaaaaaaaggaaccagaacactgtggagaaacagctgattctaacactaggaaagggaatatagaaaatgagcctggaacatttggtagtgccagatagtaagaacatgctaaactccacggtctcgctctaaacaaaaaacactgatgggatgtgtcaaagaagccaactaagagacttcccaatgtccaaagctggaactatttgagcaaaaatccaaagcaaaaactagtattggatttagcccaaagtatcaaataactatacatgagtccatgctatgtaaataaataatttcataaataaatggaggaatagagacaaatctccaatgcagaaaaaactccaaaaacttatgtaacttctctgccctcacggagagggaatgtaactccccactccacaggggctgtgtatagtgactttcttattaaaaaacagtgtgaaaagagggggaaagagtaactttatagtggataaacatgacacctattactttagccaggtggtcacatttaacattgataagtcacgttgagggtatatatgctttataaaatgtgcttaaaatggcccattacttctgtggtctttcaaaaaccccagtttaattatgaggaaaaaaaatcagacaaatccccactgagaggcatactacaaaataccagcctggccagcacttttaaaaactgccagaaaaattctgagaaactgtcatagccaaaagcagattaaggaaacaggacaattgagtgtaatatggaatccttggagagatactgaaatacaaaaaatagtttaaggaaatcagaatataataatagtctccagctaatgcacaaatattggttcattaattgtaagagatgttccataataacataagatgttaataaaacgggagactgagtgcaagttatatgataactctttgtattataatctcattaatttttcgtgaatctaaaacagccaaaaaattaaatctgttaaaaaacactctcagctatgtgtgcactttgtgtgtttaaatgtgatgattaatggaaacttccagtaaagattttagagtaaaattatgtattcaaaataacatattcctaattcaaattataagatcaatgttcagaatatagttttgaaaaatgctttaaacatgatgtttataaagagtatttcctttaaaataaccatcagcacttctcatttgcatctcaaattttggttgaattaatgaatgaacaataatgtgttttcatcctcaacataaagttgtgtaattaataggcaaaacattatcccatgtccctgatgctggaaatgtaattgagaacgtttaagaacctggttgtagagcttaccgctgggctgtgaacctaggcctttggactttaaattcattacccagcccactattttctatatctttgtggggaaaaagcaccctttctctagtctatttgtgtgtatcaaatgacgtccaaacttaatgggttaaaacaatttataattgcgtcatgatctgaagaccgagaatataagcagggctcagccaggttgtttttatattactagttttatagctgggggtcaccccttgggctgtgctgagctggaagctcacttctaatacagtattttatcctgcagaatcactcctatatggtctctaatgattcggtagtgtagcctggcctcctttacagcatggaatctaggcttcaagagaggaagaaatacaaatgctgccagttcttttatagcctacacttggaattggtgtggtgtcagttatgccacattctgtggtcaaaaaaaaaaacacaagtccagatcatattcacagggatggaaaatagacctcatctcttgaagggaaaagtgacaaagaatttgtggccatctttaaccaccacacatactaaataatgagaatgtaaacgaacaactgccaaaatatactacttagtcaattatcagatgctttgcacttcagttagcatgttcacatttagttgactatgtgaaagtttttagaaatcaggatttgtgaactattataagtctgagaaataatagttccggggtgactgatagtgggctttacttacatccttctcaatgtccaatagatgcccccaaatgcgaacattccatatattataaattctattgttttacattgtgatgttcagtaataagttgctttcaaagaggtcataataggcttctttcaaattttcagtttacatagagttttaatggatctccagaatcagaaactgaaagagttgaatgactggctaacaaaaacagaagaaagaacaaggaaaatggaggaagagcctcttggacctgatcttgaagacctaaaacgccaagtacaacaacataaggtaggtgtatcttatgttgcgtgctttctactagaaagcaaactctgtgtatagtacctatacacagtaacacagatgacatggttgatgggagagaattaaaacttaaagtcagccatattttaaaaattatttttacctaattgtttttgcaatctttgttgcaatggcttgaataagtcccctccaaaattcaggtgattgtattaggagatggaatatttaagggtgaataatccatcagggctcctcccttaagaataggatcaagtcccatataaaagaggcttcacacagtgttctcctatctcttgaccctccaccatgcaccaccatgtgaaaactctgtgaaaaggccctcaccagatgctaacatcttgatcttggatttcccaaactcgagaactgtgaaaaaataaaggtacattcttcctaaattacctcattctcagttatttttgttacagcagcacaaaatggattaagacatttgttgttgtttttttaaaaaatacagcatagctaggcttttcgtatttggaaaagaaatcaaacatatttgtggatgagaacaacgcagggtatgtgatttattaaaaatttgctttcctggaagacagacttcatagggattacttgtaatgcaaatttaaataataaggctacgattttttttaatgtaattttacattcaatttatagtaaattgaagctggccaagcttgatgataaatgagagtctgaagcattgcttttctatagaatatgacattttttaaatgttaatatttccatcttttttcttcagtttacttgtacatttccagttatgctccctcgctgccagaaagcatttttttttgtttctgttattgagacttctacaataatatttcttatccaaaattatgagggtgctttattttaataagtgccataaaatattacaattagctctgagttttattgttgaaataggctcctgctcaattcatgaggaaacacacacacacacaagatcctttgtaattgtcccaggattagggttgccacatttagcagacacaaataaaagaagcctacttaaatgtaaatttcagataaacaacaaataattttcttagtgtgtgtcccaaattgttcattgtttatctgaaattcacattttgctgagtgtcttttattttatctggcaactctacttatgatctgtggtttttggatttatggctttgaataggaatatctgctcctttacctcataccttcgaaatctgccttttgtcaaacttaattctctctttttataatattcagtcatatatagctttacagttcttccatgcaaatgaaagatacatttatttctaagttctagagttttttttaagtttaatgagcttcagttttgaatgacaaatggggccagcccttactattattgacccccaggagtcctctaagatctagcatttaagaagaactgtaactatggtaatccccgtctgctatgccatcaggaaaaaaacatcaactgtattgcaattatgtagaaattgtaactgtgattacttgtcatatagatactaattgagcacctgaagaagaagttaggtacagtgctagttctctaaccgtaccgcttttccgatgtggcacatttgcttctctcgttgacactatatctgccctctttcccttggcctacactggaagttacatgcagaaagtgtctatataaaccaggggtgtccaacccgttggcttccctgggcgacattggaagaattgtcttgggccacacataaaatatactaacactaatgatagctggtgaactaaaagaaataattgaaaaaatattttaagaaagtttacaaatttgtgttgggccacattgaaagccatcctgggtcatggattggacaaggttgatgtacagcaatggcttctctctaccggagggtatttctggtgcagaaccatttcagccagtttgaaggtggacaggaagtggaattagtgccaccagagctgcccttagccaatgaggagtaaaagttgatagagaaatcctgtagaatctttgtcccatagtgggacatttctaaggtatattctccacagtctttcagagattccccagtaagactgagctccaggtatccacagggtaacttcctgaacgtccccgtgctctcataatgccttacgagttcaccctccaaataaaccatttatttgttcacaaatcttttgttcaggatgtgtttttggaggaatctaacccaagacaaacttctcccactagaagccagaattcgagctccagttctaccactaactaaattgtcattttccaaacatcacttaatgtcccaggttctctgtatctttactttggaaataaaagagtgagtttgtttctagtgttccttccagtcacagtttaaatgtgtccaatacttttggaagttgaagtattttagaaaaggccaagattaggccacgtaacactgaacatcagaaggcaggacactgctgctggatgcctggagtgtaaagcgaaatccagggagaagagctccaaaagagcagtagaagaagaatgttagcatagctaagtacggataacctagggcagctatgaaggaagttcttagcttgggacgctgaacagactcttcattaaggtgagacaagctatccaggatcttaatattctgccaggtacctgaaatgttttgtagttttttctgaaagatataatgtgaatgaaatggaaaacgtttgacaaatattgtcataaaatttaaatatattattcattacttgaaagtatgccatttctaatgactatgaaattgccttgaagaaaaaatgtgaaacaaaagaaggcaacaggagtatatgcaagttgattatgtaacattttacctccaggcattatttatttatttaaagggcataaagaggccagaaggcattggttttctggctcagagagtaaggccaactcctacttttaactatttgagcactcttttttttgacagatttgacaatattttttgaaatatttgacagattttttttttataaaaattaagggaaagattcatattcaagtcctgaatattgataatgctcttttgtttcttggcaacaattttggcgagaagaaggtgacttaacatcaaacaatttagcaaagagttgactttatttaaacctgaaacatgtacattatattgtcttttaagactaaaaggagcatacatacagaattaaaggaacactgttttgttagtcttgccacacttcataaaacaaaagaaaataaatgttacttctttgggtaactgagttcaaactaaagccttatttatatagtcgttgaatcgctttgcagctttttttcccaagaattgtaaatcattgaaagtaaggaaatttctccttctgacaacaaaatgcatcagtaaccttagagtccccacaaaagcaactcccatctgctgcatcaccaaacttctaacctaatataatatttatttttagctttgtgtagatagacattaaatccttgtgccatcaccattttttcttaaagatgattgcagatgacaaaattaaagaaaagatacagattttattgctgggaattgatttaaattctgctcagatcagaggtcgcctgctctctctctctcaactggagggcaagattaaaatgtttgcaaatcttgcaagtacactgtgaatattacagatatgcttctgtatattctgtgacaggatcctttgctatcttcatttcaacagcattttattatgaggcaggctagaaattcagacactgtgaaatgtcaggaagataagtcacttttactgaacctggcaattaggtaaggtaaagcaattgatcctatatggtggttactattaaatctagccaaactctttactctgggtaaccaagaaaagttcaattggctgcaccatttgggagaaaccactcatccttcatagacattgctgtagggagagaatttagaggtttgctttagctttgaggcacccaagagtgagtctttctggggagtaaacaaatcgaacctctcattcccctgtgaaaaaatatatcacatataattctagctggtcttttttgtcttaaggggtagaatttattagtgatgttgacaaagaatgaaaggatttccctcgaaggagtggcatgatgctattgaggaggaaaagccttgagctttcattaatagtaaagaagtttgccattttggaggcatttttttcaaaaggaaaatatttaacagtgaaatcttttgtctcctggcacagtgagactgcgatgaagtttaaagctgagtttactagctaggttttccattcttttgagagatttagacttttgtgcatagatgcataaccttggtgacagcatcaacaaagactttacaaattacaagaatttgccgatgtgaatatatactctatattctgacttcagtgaaggttatatgtgaaatactgattaatacaaactaagtagcctcttagaaactcagtcacctatccttttcttgaaggttagttaaaggcagacatttgggttgccaagattgtgaaatatcctcatctggtgacctttaaaatgatctagatgttcatgttacagagaaggattaggtataattctgccaaaggatctgacatttcatttcattccattgcattctattccatatcactgaacaaaccctcattatagcacatgggtgctgtgaagaatgcagaaaccaatcatttacgatgtcttgtactatactgaatgctggaggatttaagcctgatcatggagggtgatcatgagtcttatataaaagactcaggcatttgcagtagtagttctatgagtaacaggaaaccattattcatgagaaattaaactagaaatagcagcaatttaggaaaacttatcttaatatttaagaagatattttttgaggataaataaaagagcagagaaacaggaggccggaaaacatgttaagaggatattgctgaaagtatatagagcctgaatgaaagcaatgacaacaaaaattgtaaacaggtacaaagcattctggatatcaaatcaaaaccaataggactagatttaggatatgaacaaaaagctcaaagtaatagattctgggactgggcaattgggacttgagattggtaattaagaaaataggcagtgaaaaagagaaatgcaatagttggaagaaggataagtgattcagttaagtttgacagtgccataggatcaagtggtgcttttagtggttagcaaactcactctcatatttagcaaggttaaaattacatgttgtttgtttctgctatgaagtttcattttatttcctgtcttttgccctcataagtgcttaatgaaagtttaatggttatgatggtaagggggataaacactataatctgaaaaaatactgtattataaccagagagccagatttcttttgtgttttcagagtgcttagtcaataattgatgctcagtaaatgtttttagaacacatgttctgattatattgactagttttattatccaaatcgtctccatcatggctaactttctgacaagggcatgaaagtttgataatttcaattaaaacgttgggcatacagcaaaaaaaaattcataaagctgtagaaaaatacatctgtaaagtggcttacctggtgatgttatctctggtgtcttcaatctctgactttccttttttccttctatctctgttgcattcccatatgcaaatatcttaatagtgctaaaccattgactatgaaattggtttgagtggtagtattattttgacataaatgattggaagtttatgtaaaaaagaacatcacacttttatagtctacgtagtagtatgtgcatgatattcagttacaatttttaaaatcgaattgagaagacatctaatatcccataagaattctattaacaagcatcatattccaagggtatatttgcacagtaatgctatagattattaaaataataataatataaaatccatgcccatattcttattttacaaatcaagtatttctagctatcagattattatttactttattagaaattactgagtattgattcagtaacattacttagaatgtcacagctttgtttgacagtatatcggtatagctacgaaaattatacctgatcaagactctgtcatcttagaggcactaacattagttattatacttcattactcttgtaatacttcctcatgagaagacactgacctctccaatggtgtttaaaggaaaaaaataagtaccctatttctaatttactgagttagtctcatgtaaaatgtctctctctctctgaaccagtactgtaacaatcaatttcagttctttcgtataggtaatacaaaattaataatgtagataaactaattataaaaaacattttaaaatgcattttagggaaaccttacaagaaagctaagacacacatgataacatgaattttaaggcaataattttccttatcaaatgtatgaccgtatcttataacaaaatgcatgtccgtaaatccaatcccgtgttaaaatataaggttgaatatgatactttttctgaagaatatggagaactatcctgtttaatatttctgttatgaacagaatttctagtggatttctaatactagtagatttctactggtacatctggtagtactctcttattcattggaagtaatgatactgtatcctttaacaattaaatttttatctaagtcatatctagtaagactaaaaaagcactaaactatttttacataatggtctacagttttggcacactgaggatatttaataatggaaatataatgtgattaccaagttattagaaataaatagtgatgctcaaaagggctatttccatgaatctcagtgtaagaatgcaaggataatgtgaatacgtcagaaatgaaagaaaataagcatttcctcaccacctaccaaatctaagcactgtacaagctgaagttaatgtattgtctcatttaactctagtaataagcatgtcttagaagaagttttaaaatagattgagggggtgcatgtgcaggtttgttacatggatatatcgtgtagtggtggagtctgggattttagtatatccataatctgaatagcgaacactatactcaataggtaatttttcacccctcacccccctaccagcctataatcttttgtagtttccagtttatattattccactctagatgtccgtgtgtaccctttgtttagtttcttcttataagcgagaacatgttgcatttaggtttctgtttccaagttacttcacttaggataatggcctatagttcctattcatgtaactgcaaaagacaggatttcatactttcttaggctgtgtagtgttctgtggtgtgtgtgtatatatgtgtgtatatatatgtatgtgtgtgtgtatatatatatatatatatatgcgtatatacacacatatatacatgtgcatatcacattttctttatccaatcatttactgatggacgcttaggttgattctttgctattgtaaatagtgctatgataaacatacaactgcaggtagctttttcatgtaacactttttgttgtttttgttgagtatatacccagtactaggattgcaggatccaatagttgtgttttaagttctttgagaaatctccatactgttttacataatgtttatattaacttacattcccaccaagagtgaataaacattttcttttctccacatccttgccaacacctgttgttgtttgacttttttaatgacaggtatccccttaaaaaaatgagatactgtcatttggaacaatgtggatggaactagagatcgttatgttaagtgaaataagccaggcacagaaagacaaacatctcttatgttctgacttatttgtgggatctaaaaattaaaacaattgaagtcatggaaatagagagtagaaggatggttatcagagactgggaagggtggtggaagggaggtggggatggttattgggtacaaaaattacagttagaaagaatgaaaagacataatatttgatcatatcatacagtaactatggtcaataataacttgtacattttacaataactgtgaaagcatataattaggttgcttgtaagacaaaggacaaatgcttaaggtgatagatactaaattctccatgatgtgattatttcactttgcatgcctgtatcaaaacatctcatgtaccccacaaatacacctactctgtacccacaaatttttaaatgacattgaaaaaaacaaataatagccatactgattggtgtgagatcatatctccttgtggttttaatttgcatttctctgatgattagtgatgttgagcattttctcatatgtttgttggccacttgtatatcttcttttaaaaaatgtctgctaatgtcctttgcctactttttaatggggttatctatttttcttcttgttgagttacttttagattctagatattagttttttgttagatgtatagttcggaattgttttccattctataagttgtctgttcattctgttgattgttttttgtttttttgtttgtttgtttttgctgttcagaagattttaaaattaagttccatttgtctacttttgtttttgagtacttagtcataaattctttgcccaagccagtgtcgagaagagtttttcctaggttttcttttaggatttttatattttcaggtcttacatttaagtctttaatacattttgagttaatttttgtatatggtgatttatgacccagtttcattcttctgcttatgactatccaatatttacagcacaatttactgaataggatgtcctttccccagtgtatatatacatttttttactttgttaaagatgtgttggtcatagatatgtggttttatatctgggttcttaatttggttaaatcaatctatatgtatctgtttttataccagtaccatactgttttggttactgtagccttttagtataatttgaagtcaggtaatgtgatgccttcaactttattcttcttgcttagcattgctttgactatttgggctcttttttgattctctatgtattttactatctttttctaattctgtgaaaaatgatgttggtaatttataaggactgtgttcaatctgtaaattgctttgagcagtgtggttattttaacaatattgatgctcccaatccatgagcagggaaagtttttccatttgtttgtgtcatctatgatttatttcatgggtgttttgtagttctccttgtagacacctttcacttttttgtttaaaggcattcctaggtattttttttttttgtagttgttgtaaatgagattgagttcttgatttggttctcagcttgatcattattggtgtatagaaatgctaccaattttgtacattgatttcatatcctgaaactttactgaagtcatttatcaaatatagggtccttttggaggagtcttaagggttttctagatgtaaaatcctatcatcagtgaagagaaatcatttgactttctttttcccaatttggatgccttttatttctttctcttgcctgattgctctagctaggacttccagtactatgttgaattggagcagtgaaaatgggtatccttgtcttgttgtagttcttgggggaggggggtgctctcaacatgttcctgtttagtatgatgttggctcttggtttgtcatatatgacttttgttattttgagatatgttctttcaatgcctagttgttgagggtctttatcttggggagaggctggattttatcaaatgccttttctgcatctattgagatgatcatatgttttttgtttttaattctttttatgtggtgaatcacatatattgctctgcatatattgcaccacacaaaacatatattgtgttatgtggtgaatcacagatattgctctgcatatatccctgcctacctggcataaagctcacgttattgtcatgtattatctttttgttatgcttttgggtttggtttgctagcattctgttgaggatttttgcatctatgttcatcagggatattggcctgtggtttcctttttgttgtgtccttacctgcctttggtatcatggtgatactggcttcgtagaattaattagggagaatttcctcttgtttgatattttgcaacagttacaataggattggtaccagttctttgcatgtctggtagaattcggctgtgaatacgtctggtcctgagctttattttattgggagatatttattactgattcagtttcactatttgttattggtctgtccaagatttttgcttcttgtggttcaattttgggagttgatatgtatccaggaatttattcatttcctccagattttctaatttgtgtacctagagatgcccatagtagtctgataatctttcgtatttctatggtatcagttgtaacgtcacatctatcatctctgactttgcttatttgattcttctgtttttttcttggttaatctagctagtggcctattaattttgtttatcttttcaaagaaaactctctaatttttttaattttttgtcttttattatctcagtttcatttagttctgctctgatcattgttatttcttatattctgctagctttggtttcggtttgttcttggttttctagttcattgaagtacaatattagtttgctaattttagatctttctatctttttggtgtaggcagttaatgctataaatttccatcttaggactgcttttgctgtatcccagaggtggaggtatgttgtatgtctctttttatttgtttcaaaaagttttaatttcttccttgatttcattgtccaaagatcattcaggagcaggttgtttaatttccatgtatttgtatagatttaaggagtcttcttggtactcatttctagtttttttccactgtggtgcaagaagatgcttgatatgattttgatttttttaaaaatgtgttaagaaccaccttgtggcctagcacattttcaatttttgataatgatccacgtgcagatgagaataatgtacattctgtggtggtagaatagaatgttctgtaagtgtctggcctggaaggatattaatacttgattttacagacaaatagatgtgttcaaagagtttaaggagttgttcaaggtaacttcagtattaattggtagattctgattttaactttgacctgtctgcctttgagaccatttctctccattttgagattccagtgaagcttgactccacctgagatcctagagactagagcagttgcagagaagtgacaaagagatttgaagatgttgtggcatttggattcccaggattgggaatgtctagatagaaggtacagagactgtgtgcatatgagtcttcaaacatagagtaagcagtagtggtagctacacattaaatactcagaatcaaaatgcttaatgaaataattcatcaccattactcctgtagttctttaaaatagaggaaaaagagactataagggaaacaggaatataggcttatgataagaatggcaataccgtctgagcaggaggataatcattggaactgaatttcacaactatattctgttagcagcacaatgcatagcatttcctctgtgctctgcctgaaactttccaccccaactctctcccaataatcttcttttctttttcaataattattttcagtaaaggcattttataattatttattcaatgttattggtttttaatctgattttaattctgtaactatatgcagaatgtatgggtgggtgcatgcatggattgtagaaagagtaggaaaggcaagagaattgagggctaccatttcgtgattagggactgtcctcactccatgacatatgtctgcccatgcaaatttttctgtgataaccatcagatgaggtagtttgaacctacttttattaatgtagtgtaaataaattggaagttcaggtattatttaaggatttaacacttactgtatatttctccagaccttaaaactttgctgtaacttcacttgttttcatgacttttcaaaaatcacattctcttcctgcacttatgatgtctattagaaaggatgatagtcagaatgtattagatgagggtaaaatagattagtattaggttaggtcattgcagtttagtttcaaaactttgatataaatatggctaaatatgaattctttcaactaattagatgctaatatttttggaatttatattgttttccaggcaaaatgcaaaacagttttaccttattcaatcttcttaaccacataaagaaataggcagttttattatcttagttttacaaattaggaagctgaggcttggtgtggttgatgactttctcaaagtcacgtgattggttattgatgcttccaggaattacacatagaaaatctgatttcagatgctacacttttgactacagttttactgtctcctcatagtcatgcacaagttttggtcaatctatttcatcctatgtccttttccatatgtaggagtacattaattgtctactttatttttaaaacagtttcttttcgtatttattgagtccccttcaggctattgagaagcatttagtgtgcttgtatagcctttcaaatctctccattgaaacagtctttcagaacccccatttggtagcttaggagttggcagaaacataaacattcatttctaacaaaaagataaaatcagtgtgttctgatataagaactaataaagatattcaatcacatttaagtaagtgaatatcaaaagcttttctagggtagcctgttgaggaagattatttaaaatattcagcaaatttataacaaagttatataccgtaaatagatcttcatggaaagctagacaatactgtgaccagccaggcttagcaaagtgaatatttcactgcaaataaaatcgaaagtcctttccagatcatatcattcaggccagcaagggatatagagcctagcccagtgtagaggtggtagaaggaatggggcatagaggaaaagagtgaaaaaaataaattacctaccaccccatcatttcccaagaaatcctaacactttctgatctgtacttgaagtttttatttgaaaaaaagtcaattcctgtccagatgtcttgaattaacatgatcattagtatctagggatttttttgttcatgagacagcttttttaagatacttctttcctggatgttagactcaactctattcctagaaccttctgaattcttaatgtcctttgcaaattttatgtttgctacaatttttttctcgttagtctttccttatgtgtgcatttattgagataaactacaaactactgaatatttgtaattaaacatctaaatatattaattttaaagtcatttttggagacaatagattgccttccaattcatgatgaacagcgttctgtgttgtttctaggggtgtgttttgtgtgtgtgtgtgtgtgtgtgtgtgcgtgtgcgtgtttgtgtgtgtgtgacctgcaagtaccggcaattagctgttgggtattcaatgaagtcggaggagtagttaaaaaaaaaaaaaactttacatataggtaacagctgttcttttcctgttctttccatagctgagtctatgctatggccaaaagaaatagacaagtaaaacaaaagcttctcccatcgaatttacaggatacccatccttgtttttgttttctattatactgcctttcgattaattattgctcttcacctttaaacatcaaatcaaaaatttccctagccttacataattccatgtctttatttcctaagtattattttacatgtgttctaagaaagggtaaaatagcatagatctagaataaacactgaagtggctctccagtggtttttctaagccacttttgaaaaccaacttgacatggacaagagccagaagaattcagtatcactgatggcatttaaaagaagtacaagaaaagtcaggtttaaataataaaattgggaacatgtactaagggagtaacaaattttgttaagccctttaactagagacttatttagaagaaatacaattattcacagaggtataacaaaaactgtttgtccaatctaggcattcttaatgttacatctcactgttggccttttctcttgtcataaagaaaaaaatacattatttgacatttgacaacaaacattggtaacatttgtatctaataatggtaatgaaatttaactaggaacatgatagatgtttgaaatctggtaagtgttacaaaagcattcctttaataaaataatgaaaataaatgcataataaagtacctagtatgtgtgtatatatgtgtatgtgtatgtacaatctggaagcttttaataaaggaaaacattttaacaatattatattacaatattttaatttgaaggtattattttctgacagacaaacatttttgtgtacttctctagggatgcatctatatttggaaactatttggctcatatttcaggcttaattagcaaatccaatataaatctccgttgtataaattcatctatgacaaattgaaatccataagaagtcagtatttaaaattgtaattaaatatagccttacaacactttagcatattattttttttaaatactcttgagaattcatttctttccaactggagaaacaggcaggcattctttaccccaatgatcaaggcctttattcatggattcctagtttggcagaacaattgaactttttaactccagctttttatgtctggcgtttctgctacttgtaagaatcagtgtaaaagtaaaccctgaacgttgcatagttcataatctgtattttgctgatattaaggagattagctaatacagttatattcactaatatttatttcgcatttgaagtctgagaaaataggagacgtgcttactgttttaccatagcttttgtcttacagctatttagtgtgctcaaaaaagtcagtttaaccttttttagtttaattcctaattagctgagaaagaagaaatacaattttaaaaagtcatagaggagaagagatactggaaataacattaaatcaaatgtaccttatgcaaatctactccagcactctggactcttcaacgttcttagtcactgtagagagcctttccccactcctttatttccttgtactcaccgtaagtccagagggttcttgtgttagattttaatgctatcatctcacaactctctttagtggtactttacgttagcacttctgccaagcataaaatataaacccttgatcaatatggcaagaatgccatttccaattataaaacaaatagatgaacgaaacaaaatcagaacaactaagtaatggagaatatagtacgtttgatcacatagactttaaaagactcaataagagttggattcattccatggatccaatgtttttcttacacttcttaagtaaaatatattaaaattgtgaaaaagcaatttacatgtaaaaatgaaaactggcattatttacttgtaattttgtaatatatgtaattatatatactcattgaaggacagaaaagaattgactaaattcagaaaaccaacttatgatacactggccaccaaattatcattttaattattatttgaaacattcccggctgacaccttcaaaatgttcccagtcctgtcttatataactcagaaaacacagactcaacatgactgtcaaggacaactctgaattttaatgtttccatttttggcctcatggcaaaaagagttttattaaccattataagctctggaatgtcaaaggcatgataggcagtatagattgcacacacaaaatagatgcatagtcattttattctaaattgcttcacttgaaaatgtagtatgaaaatctagagagacgaagtaaaaagaagtgattttatagtgttctaaaatgttgaggcttcgaaaataagaagcctaggataaaaatgctcatgcatttgagattgtgattcagccatcctaataagttcccttccacctgccatagagtttgaatacctaagagctagactgataggtgctaagcactgttgttttgcaagtagggacagcacgtttgccagaaagtaacgggaaatgtcccaaacttgtttctccactcttgtgttatgtaacaaaatgttctaagaaacaaagtagttgcctagaagtctcaaatagctattcagagaaatcccaataataaatagtgtaacagggtaaggtcttatgggatctggagcacccaggcaacataccttggttctagagcagcctcctttgtttacccctaatttattcctgtgtttacccctgttcatcattacaaaataattgtacatcatgtttttaaaaagattggaaatactgttttgtgacagcctcacttaatagggggaaatgattttttcagagccacatttgtaagttagaaaggcagtatttgaattattctggttttatcctagggttcagttgagaccaagtggttattttctgttgaggttagtgtaattgtgattacaccaaaaatcactaattcttcctattatattgtaatctttgtgcaatcaggaaggaacaaactcatctgtgcatgttttccccaaacccccacatggtaccatttatctgacaaatgtttattgatctttatttgcttgtaatacatagtgagaaggacagagggcatctctgttctagtggactgcctattatagtaagtagagacaaaaggactaagctgatacataagaaattattgagtagtgacaatactatgattaaaaaaatgacagaaatggtgaattactagggagcaacattggatagtttgctcatgaaaagctgctctaggtaggtgacacttacattgagtcctgaatgataaagaaatgatttaaacatctggaagaaaagcaatcctggtagagggaacagcttgacacatttttggaagagagacaaagcaagtcattctgaaacactgtgagggcgagaatggtatacaattagactggtgaggtagtcaggtgctagatcatataagaatttcaggtagagaagttaaattttctttcttagtatgatagaaatctattggtttttataaatcggactgacatctgatttgtagtttgagcggaagggaaaaaacgagtaaaggagctaaaaagtagtgtataggccaggcacagtggctcacgtttgtaatctcagcactttgggaggctgaggtgggtagattacctgaggtcaggagtttgagagcagcctggccaacgtggtgaaatcccgtctcaactgaaaatacaaaaaattagctgggcgtggtggtgtgcacctgtaatctcagctactcgggaggctgaggcaggagaatcccttgaacccggtaggtggagtttgcagtgagccgagatcatgccattggcattccaccctgggtgacacagtgagaatccgtctccaaaatagaaaaaaaaaataaaaaaagtagcacataggtaggagggtaatcaagagaaggtgtcaagaatgagggagtggccaattaggttagtaatcaacatgtcaagtaagacgctataacaaatggttattgaatttaggaacatgaaagttgatggtgtcctttacaaaagatatttcaatgggttagtgggcaaagtgaatagtaggataaatatgtaggcacagtaactataggatacatttgtttttttttttttcagtgaagaggaacacataataggacagtaggaggaccggtttgttggatcaagagtttgttttatttttatggtaatggagaagttcagtagagaagaagagcctgaaaatgccagaagtgctgatagttgtaggaaaaaagtccttgaaagggagaaagggggtgggatgagaaggagaacatcctgctgtacctttcttaacatttgtcttctctagatactttccagttaaattaacaatagaacatataaattttgctgagcgtcatagcagaaaattggcttggaatggttttaggttaataaaaaatgggagtacctgagatgtagcagaaataaatttcaccatttgagagcaaatcatttcaacacacatgtaagaatatcattttaatttcctttaaaacattttatctttcaggtgcttcaagaagatctagaacaagaacaagtcagggtcaattctctcactcacatggtggtggtagttgatgaatctagtggagatcacgcaactgctgctttggaagaacaacttaaggtcagattattttgcttagtaaactaaatatgtcctttaaaagaactataacttgaaaagtattttaaaaatttagaatgcaatttatatattaaaatacttagaatacaatatgtgtacaatatacacacactcataatcagctgaagtgctgtgatttaaagaattccataattctgatacaatagtaactaactgcggatgggtaaaatctaatactttaccagaaaatttcaattaatattaaataaggctgggaagcaggggttgaagggaggttactggttaaaaaaaatttaaatgcagacatttttctaaggcatggagtatttccatttaaaataacaattgaaagcacccatttcatcattagctgacccagtgtgaatagcttttcaatataattcatccaaggtgatgcttgtgtggttaaggcatcttgaaaaacagtccgtagaactcacagatggttgtatggtgggcctatactcttctgtatttgttttctacttgctttcattttcaccttattttctgcctttatttctttggcccaaagacatctactaaatatcggtaaatgtactgattatccctaatttgcttaaactctatctgcatttgtccatgattgcatacccctttaatggctactgccttccagcctcctcttttgtcttcaatcttctttcctcttttgatgttctcattttgcctctatatagctctgtagtgtcatgtgactttaagataatctagactagtatctaaaagggcagcattaaaaggaatcaagtggagagaaagcccttgctataacttttctttgattccatcccatcagttccttcagtcccaaaagaatccatgcttgagttctatactttatttaactattggctggaattgtcgtggaatgctctgcttccatttgactttgaaacagagatgattcttaggttctttgcaagtgatataatcttgtcttacctagtttactttttaaaagcaagaagaagaggacgagaagatggtacagaaggaggagtaaggagaaatcataaagtattaaaagattgataaagtataaaaacataaaaaaatttaacacaaataccctgggtatattataattctagggtagcttcagagactgtggactttaatatgtttaatactggactgagagggattctggtagacgtaattagaagaattacaggaaagagaaacaggtatttggatcccctaaaagaaaaacaatcatcaggactcagagaaggatcttagcaggctttttattagagcagagtctggctatccttaacttattcctcaaaacctattagtgttgagtgcccatctcacgccttctcttccttcgccctggcatccctcatcaccacaattccttcatccattgcactaaaattctgttgaaatgccatccagaggctcaaaaaggatagccagctgtctttggtaaagaggtacagatgggggaaagtaggaagggaagtccccatttagtccaataaggaagagagatgcatacttaacaccctgagttagaactctaaaaatacttccaataggatatatctgcatgtattgatttattctgtaaattctattatgatgatattttaggatttctctaactttaaaatacctttagagtcttctttggaaaaggtttgaagaaaaccaaagacaggtcagaatatatgcttagagtttctgaaagatgacatagcttatgaagtgtaatattctgaaaagtgtgctctccgataattagattctttctctcaaaggttcagcttgtccctcagcaatgttactgcagattagagtcttgtccttaactttagaggcttccaggatgtcagtgcgtagagagtctgtttcataggcagtgatgccagttaacttatttgattgagaaatatttttataaactaaattttataactaaaattggtcatttatatagtcttcagttttagaggtcattaccacatctctttctaagcattccacatcccatttgaatttttttcaacaagtactcgttatgttcttactatgtcccagggattgtgttgggtaaccaggtaagacagttaaaaaaaagaatttgtcactatctaccctggttgcgatgggtaatttgagagcctactgccttccttggaaccctggaacaatggtgactatatctcagtctccctctttgtagtagaatgctaattccttgtcatccatggtcactatgataggcaggtaggcatgggaactgcgctcttggtacatgcaatccagtataaaaatagacattaataaagtatttttaaaaatgagcaaatgttaaagaatggatgcaacttatttataaaggcaaaaaataagcttttgtgacaggaaattactctgacttagactgaactttgaacgcaacagatgattcctgaggaaagttttctttaagctaagatctaaatcatacattggaggaaaatggataaagtgtgcatgtaagtgtcatgggatccttgggtgtcactttgccagccagaaacctctgtggccggcagcacctctgtctgggttttgcttgtgcccgctgggctccttgcacccactcagcctggcaggctgtgcttggcttgcactactggcccggatccccatgcctgccaagggcaagccaggcacagagcagtaagaggtatgtgagcaagcgagcatgaggcctggccactgtgcacagacaggcatgccagctgcagcggaaggcagctacaggcaccagtactggtggcagctccatgtgaggctgtggctggaccagatgtaccacaagtagcttctgctgcaggcaccaatgtctggacaggggatcgcggtggcacctgaaagctcagagacaccaggaaccacagagccccaaggagcatgttacagcatgccacaaccctggcttgaggagccccaaggtctgggctctgcaaaaggccacagctcttctctgtttctcattgcccatagcatggtgagtggggggcatgtttcagccctgtttgtgttacagctctttttgtcctgccattcagcaagtcctgagttcttgtcccatgtccaggaagaatgaggtacatggacaactggagggtgagcaaggtgcagaggagcttcattgagcgagagaacagctctcaggataccacggtgggtagctcctttccacaggcaggtcgtcccagggagtgtgcagctgtgagtagagaggagacccatggtgggtggctcctttatgcaggcaggtcatcctgaagagtcaaggagacacaaagtaggtagctccttcctgcggctggtagtcccaatgtctaagtttgtctgagtctggggtttttatgggctcggaagggaggaggtacattctaattggtccatggacatccatggataggcccagaaaaagcaccataagttctcattctgggccacaaactccacccagaactggcagcccagcccccaggcttcaggccattcttggcttgaaggaggggtttctctgtggatctgctcctttctgcccaggagccagtctgcctcctgccaccatcaacatgccatccatgtagcctaggcagtttataccaaggggtacctgcaggcccacaccgaaccatcctcagtccccactcagcctctctcccatgctcatcagtgcccaaagtccagacgggcgcaaggcagcagggggctggcatgccagcactgtcccgagcacacacataaccagtcaggttgcgacaacacctggtcttggccgcaactttgcttctcccaggagccagtgcggggagcgaggagatgccagggagtgggagcaggcacttcttagtatgtggaggcaggggggcttcccaggcccccaagagcgcaggaatgcccaggtccggagctgtggctgggtggctgcagctgcacctggaagcatggggctcccaccctgccaactcagtagggagcagcgctcctgcttgttcctggcccttggtggctccacacagtgcacagccctggccacgcctcccttgctgcagctggcatctttgcagtggccgctccagacaggctgctgctgccatcataagtgagattggtggaggtgggtagagtttctaggatggataaatggtaaatcaagagagcgtggtttataaaaacttgcatgaaaaaagactataaaaagaccataaagaaagccttttgttcttgggagataactgtttctaataaagaaagaaggagaaacatggttaagcccatagcttatagaagatgctctaatgaaaatgtcttccaaagaaaaagcaaaaccattaaaaccctatttttaggtatgttattctgtacaagttaaaagttgagagccaactatagatgtattgaaggtctgtgtggtcatagaaccaggagaatttctgccatataaaaggcatttgaattattttgttaaaatactttaatattgaagttactgcctaatattttggagaattaaaagtatatgaaaagaatgaggctaggtacagtggctcacacctgtaatcccagcactttggaaggctggggagagaatattgcttgagcccagaagttcaaagattagcctgggcaacatagcaagactatcatatcgtattttgattttcctaataaaaataattataaagaatggataaagacagagtgtattaaggttctctagaaggacagaacccactggatggatggatggatggatagatagatgtatatatgtgtatataaaatatacatttaggagtttatcatggagaattggctcacatgattacaaggtgaagtcccatgatacgccatctgcaagctgggagaagagagaacctagtagcctggtgcagtccaagtccaaaagcctcaagaccagagaagctgacagtgcagctctcagtgtgaggccaaaggccttagagcccctgggaaatcactggtgtaagtcccccagtccaaagactggagaacctggagtcctggagtctgatgtccgagggcaggaggagaggaagccaactgccccgcagggcacaggaagagagtgagtaaacttaccaagcaagctactttatccctgttctcctggctttgttctagtctaactggcagctgattgggtggtgcccacccacattgagggtgggccttcctctcccagtccactggtccacatgtcagccttctttggctacactctcacagacacacccggaagaaacaatacttcatcagtgatctaggcatccctcaattccatgaagttgacacataatattaaccgtcacaacaagtattctattttcaagaaggaaaacctggaaaacacaattttggatcagattattaaacatgaggccatgctcactggtatggtttctcacttatctcatgcagttaataaacatatttattgcctgaaggaataatttttgcagatgagatagttttctaagaactaagctacattcgctaaaattgagtcatgtaaaccaactttatatcagatgacattaaacaatttgtagaaatactttgtggtagtattaagacaaattattttgttagacttattaaattggctgatccaatggaatggaatgaatttgaggtattctgattttcctgaaccttttagcaaagcctctgcgtgatactgtttattggtaaggtgagtctatctttctctatgagtgttcgtgggtgagtctgtgttttaatatattcctttctagtatctgatttacgtgctgaaaattctggggaaggaagccatttgaggatttagctggggctctgtgtaaagtgtgcccctgtaggagtggttaatggaatatttctgctcccatattaacttagaaggtttatagctatgtcctgaggagttagaatatcatatacaaatgttacatcctattgttttaagtcagaaaactcatgtttatagttcgaaatgttgctgctttttaaaaatgcaagtagtataaatcagttgaattagtttgagatacaaagggtctgacttcccatctatagatataaatgtaaatatatataaatgtaagtgtgtaaaaatacatgtaattttgtctatataaaaatatatgtataaatgtgtatatagttaaatttatatacatctctttatgtttctatatatatacatacgtacatctttgtgcatatgtatatatatgtatatacatacatatacataaacataagcacatatgagatagagtgcacatgcttactttgaaacaagcttgatattaaggatgatacagattcttagttaatgcaatcacagactgtgatatagtgtctagattacatgaactaataattatactctatgctgatttgaatacactgtattttacgcccacgattggtactctatcttagcaggattttctcagatggcagcatcctgtgaagaatatttgtagagtgggcgattatttaattaaaaaataactaatcatagggaaatggcacatgaacactattgtgatggtgaaaaaggaaggcactttctctatggtttttcaaaatgtcataatatcagaagcagacagaagttggtaactctggatgtcttctgcccagatctttcctgagtccattttcttctaattatcttctgaacacatccttgaagtccaaacaacacttcaaactcaacaagatgaaacttacctcactgtacattgccttcctttaaacctgctttccttactgaatttcttatttttgtcattgcactggcacttatcatgacacctgtaccagaaacctagagtcatccccaaattcatccctgtcctttcccttatgagccctttgcatgcaatgtcaaaatatttctcaaccttatcttgtatttattatttcatctttgttcttgtcaacatttctcaaggtataggccatatcataagcccccaaagtccttgccttcagtcttaccgctcttccatccaatctccacattgaagtcagtgtgggttcccaagagcctgtttaatcgttctcctttgcttaaaatcctgagtcactttccagattctgatactttggcctacaaggtatttgattacctgactcctaccagtctctatagacttgtctcatgttatctgctttatgtccctcaacctgcatttgattcatacaagctgtttctgataccctgtatgttacgacctctttgcacataccaccgggtttaaacagacgactctgcttcataagatctgctttgataatttcatctatgtatagaaaactcatttcaagttttcctccatgaaattggccactctacctagtgatgactactccctctttgtgccatgtctgtaccctaattgtgtctgtttgggcaccgatcatatacttttgcagttaatattaatgtgctttactcttttattagaatctaaattacatgagatgtgtcttacacattcttgcctgcattgtcagatacaagtaatcagtaattcttgtaagataactgaatgaacctatgaacagacggttggatataattccaagaaagatttttttgacttaaaagggagagctttttgttgtaaggtaattaagaggagaaactctagaaatagacccttcctgctctgttccttatctacagtatacctttgggcaagtcacttaaccatccttggctttagtttccccatctttaatatgaagattgtattagaacctacattatcagatatctgtaaagggtaaaagggtagttgagaagctaaagcatttaaaaatcactgaaatatagtaagcaataataatattagttactattattatcatcatcagcccagagcattcttacaatgcgataagagctgtggaaagtggtgagctgttcttcattaataatatttaacacaaactggaatctcatgttcaagtatgttttaaaagaggtgacatactgagtgggaagttagacttgatagcctccaatgtcccttccaatacaggtggagtgcaagaaaataaaaggaaatactgcccaatcttatctagtagaagcataattctccctcattctgtagagaacttcagctttaaaaagcatgattctcaaaattactttcataagaaaaaacaatctgaatataatggcaaaatataaagaagtcaaatactacattctgccaattattttgaccaacagtgataatttttaaaggtgacaaatctggataagtagacaataagaatgacagacatttaatggtaacatctctttggacattgctgttagtgtcgttaatagttttaacttgtgtaacatgagtatcacacaggttacaaagggaatgtgctatatctcagttacaaagagaatgttaaaataacaaagccacttggaaagaaaatgctatactgtgaaaggtagttgttcagaaagacgataaagtcagatttttctctcatcacctaaatgtcagttaggtaactgaaatttttatagtacatatcttcgggatagtatgagaaagaaaattttatagaatgttagaccctatcaaattaagaaatagaagttatttatgaagaggaatatggttgaaacattttgatgtttcgctctagttcctaattttatatttggtgaattaaatgcatttaaaaaaaactttaaatgtgatggaaataatccacaaagctaagcatcaacatttgttgcccaagaagcaataattataattattagattattatttttcaggagttttacatgctttgtatgtaatgccaaccctatatcacaaatgagaaagccaatgcataatgaagttaaatccaagttcatatagcttgcaggtggcaaggctgacactggtattcagatgtgtgacaactcaacctgagatttctcccaatctctcaaattcatagtagaaatttgctatgtggccttgtgaaaattatgtgatttttttcagttttggtttactaatcagcaacgggggaatacagaaacctatgtaacacagtaatgtattcgtacctgtaaatttaactcattcatgcaaatactatctatctgtataaaatgcaatatctattcatatatatatgaatagatatagcatttgcatgaatgagttaaatttacaagtacaaatatatataatataaacatatatatttatttattttagcacctgtcccactcaattgcattagtacataaatatttttctcttctagaacaacactgttctagaagagaatggtttatatatgtatatagtttatataagcagtatatatatattaacacctgtcacactcgattgcattagtatataaaatttttttcttttctagaacgacactgttcagtaaggaagttgctatacacctttggctattttgagcacttgaattgtgactggtatgcttgaggaactggattttttattttatttacttaaatataaaatggcacatgattcagttattagaaaacttttgagtatgttttgatcagctttgatatgtgcattgttttttcaactgcacattgtatcaagtataaataaatgttgaatattctaatgaaatttgaacatccaaagccaatgtgctgtaagtatacagttaacgctagatttcaatttatgttaatacacggtctgttgtaatacatttggccaatagggtgttaggtagatttgaaagaacacaatgtctggattactcaatctgttttctattctgactttataatttatgagttgaacaataaattctctcatgataaaaattatcaaatgaaactcaaagataacagtgatcataatacccaccatacaaaattacaggggaaatataagcaagtatgctggaacaataatattctttttttttttttttttttttttttttttttgagacggagtcctgctctgtcacccaggctggagtgcagtggcgcgatctcggctcactgtaagctctgcctcccgggttcatgccattctcctacctcagactcccgagtagctgggactgcaggcgcctgccaccacgcctggctaattttttgtattttctgtagagatgggtttcactgtgttagccaggttggtcttgatctcctgacctcgtgatccgccagcctcggcctcccaaagtgctgggattacaggcgtgagccaccacgcccggccacccggccaataatattctttatgaatgcaagtgttaatacatttacaaaaaatttttaagtttattgatacataatatttgtacatacttatagagtacatgtgatattttgttacactgttgtatataattatatagtcttcctactctgctatcgaacattagaacttattccttctatctaagcgtatgtacccattaaacaacctctcttcattccatccacacactcttcccagtctccagtatctatcattctaatctctagctctatgagatccaattttttagctcccacatgtgaatgagaacatgtggtatttgtctttctgtgcctgcttatttaacataatgacctccagttccatttatgttgttgcaaatagctatatttcattcctttttatggccaaataacattgcattatgtatatataacctgttatctgtttatctgttgatggttctgaaaaaaaaatgcaaactttatggtactttttaaattgaagtatcaagcaaaggacataagttataattatagcttaaagacttattacagaagtaacatactatgattccacatccagaaaaagatagtatgttaccagcaaccaggaaacctccatcaagccctatggtatcataaactcttcccatctcctcaaaggtaacatgtatcttgagttataatgctgcaggttagtcttgctatatttttaacttgatgtaaatgaaacttttatatatgcagttttttaactggcttttttcactggatactatatttgtgagattcactatgttgcatatagcattactttattaattttcatcgctggatagaattactttgtatgaatataccacattttacatattctgttcagaaaattggggttgtttccagttcggaagcattacaaataattcatctatcaacataaattgtacgtatatttttgtgtatatatgtaaacttttgtattaggtatttacctaagaatagcatttcttaatcattgggtatatgcatatttagctttcaagatattaacaaagggttttccaaagttgtataaattcatattctcaccagtagtaaatgaaagtacaaactgcttcatatcttcttgaatacttgtttgttaaactttttaatttgagcctttctggtgactttataatgtcatctctcatttttcatttgtatatactgatgaccagtgaggcggaatactatttcagttgttattggccatttaaatgaactcttctctgaaatgcctgtttttctactggattttctatatttctcttactgatttattttagtttaaaatatatatattctgggtattctttgctgtttatattacatttttctttttgaatgggtaccttgccttttcactccgtaatgatatatctcttcataaacagaagtttaaatttaacatagttcacttcaatattttctgttatgtttagtgtacttttgtcctcagtttaaaaataaaactctctactttaaaattctgaagctatggtcctgggttgctatataggaactgtttgttttacctttcgtattacaatccacctattattacaggtatgaggaagggatgaatgtccattttttcccatatagatccaactgaaacaacaagttggcactgtagaatattgaggaaaagatggtcttattgcaaagattttcaataagaccatcctttcctcaatattctgtggtgtcatctttgacgaaaatattagaaataaaatgcctatacgtgcatggatcagtttatggactctaatcagttttatttctctacttgcctgtcctcatgctaattccacattgttttaattactatagcattatgacaagttttaatatatggtaatatttttttgagatggagtttcgctgtttctacccaggctggagtgcagtggcaagatctcagctcaatgcaacatccgcctccctggttcaagcaattctcctgcctcaacctcctgaatagctgggtttgcaggtgcccaccatcatgcctggctaattttttttgtattttgagtagagacagggtttcaccatgttggtcaggttggtcttgaactcctgacctcaggtgatctgccagcctcggcctgccgaagtgttgggattgcaggcgtgagctaccaggcccagcctgtatctggtaatattgtaaaagaaaaaatgcaccagacaaacaggcaagaaagactttattcaagactactgaattatggatcaagactattgccataggagagagagatggaaatcatttctactgaaagaaagacaggagagaatttaagcactgaggagagctagtagaaaaatactggaagatattagggggttaggatggtgattaggcaatctgtgattgttaattggcacttaatgaagttaggctcctactgtcccacagagactgggagataggcgtgctatcattaacaattacatttcaaagagatggctcctaggtccttgagaaagatattcccggattgtagaagatttacatctcaaagaggcagagaatatgtttttggttgcaagtttccctaaagtaagcgctctaagaaaagagaggtcaggagcctatagtcaaataaaagcctgtctagagtttagtcacattaagtttgttttggtcagttggtcagtaaaagccattttattttcttcctttttaaagattatcttgactgcttttggccatttcgatctccatatgaattttaagaacagcttgtgaaccctgcccccaaaaagaatctgctgtggttttaattggatttcatctattctctggatcaacttgtacagaatcaacatttttattatgtaaagtctttcaatcctttcatttagttaggtctttattttctctcaataatgttttatagtttttaaagtaaaggctcttaaactttctctgagatttatttcttgggtttttatatttttgctgttatgaatatatttttgaaatttcattttctatttgtgctgatataaagaaatacagttgattttttttcttggtcttgtatccaggtaccatgctacatttacttaataatttgaatacattatctgtagtattattcagatgtacatatataggttgtttttgagtaatgacagttttctttctccctttccaattatttttcatgtcattaattttccctgacatattgtactgtataaatactctagtacaatgggagtattgtggatatttatttctcattttaagtctcagagggaagaactttaataaataatcattaagtatgatctttcctgtaggtttgttgtagataccttctgttcttaatattctaagaggttttatcactaccggatgccaaattttatcatatatttttccagaatcatttgagatggtcgtatttttcttctttattctgctatatgtcaaatcacatgacttagttttctaatgctaaaaaagcctttcttcctgtaataaactaaacctggataagacgtataatcttttttgtgtattgctagattttctttgattcatagtttttcctttacgtccatgaaagtgattggcctgttattttcctttcttgtaatatgcttgctaggtttaagtacctgattatgcaggcttggtaactggcttcataactggaatttgcaaatgggaaattttaaaattaaatttttatgtatttaatacacataaaaatgtccatttttaattggaatttcaacattacatttttccagattttccgttttggagtcagctcgaatcatttgtgtctttctaggaattggtctattgcatctaaaattacagatgtatttagataaagttctatttagtccctatggtatttaatagtagtttattagctaccattgtttgaaattgaaaaaaatgtgacatgaactaagaatttctaacctctctagagaaagcaaatgatctgatgatccttagtctgtttttctacatagtaaccagagcaggagtcaagttgccctgttttctctagcacaggctcttcatttagccacagtccccattactacctattctgttacacctacattatcttatgcattttattaggtatgtacgttagaatttgtgatttcttgtggatgaaaagttgtgatgtcaagagttggcatgagacatagagggatatttatcttctatgcacttgctttcaaataagataccttttggagcccgtgctcagtggctcacgcctgcaatcccagcactttgcgaggccgaggcgggcagatcacttgaggtcaggagtttgagatgagaccagccaacatggtgaaaccccatctctactaaaatacaaaaaagagccaggtgtggtgtctcacacctgtaatcccagctacttgggaaactgaggcacaagaatcccttgaacttgggtggtggaggttgcagtgagccgagatcgcgccactgctctccagcctaggggacagagaaagactctgtctcaaagaaaaagaaaaaaaggatacctattggaatatggccctgttgtttaaaattgtaaaggtaaaaattttcaattcttgtataaaacataagctttatcaagtatagaaaaaaatgcaaaaaaaattatcattaattgtccttctaaaatgtttcactgtgttctatattaaaattctatcatgctccagatttatcacatctggaataaaggctgatttttttatcgactgagctctaaatccttactatcacaagcatctcaataattcatcacagatttaagagcactttcacatttattgatctatctgaccctagcagttacctgtctaggagagtctgtactattatctctatttcactggtgagaaaactaaagcacagcaagattgagtttgttcacagatattacaaagttgggcaacagtagaactgaagtgggaatgcaggaagtttatactttatgtaatgattagcagattgaaagatccaaaaaagatggttctaagacaaaagttgggtggggaaagccacctattgataacgacagtagtagtattcagttttgggatatttgtgcaagacattaacctcaaaggtaaggagcccacctcaaggagctcagagtctgcgaggtataaaacgataaggaagaggaaacctcaagctaccaaggaatgcctgggaatgtgatgaatgctggaaggaacactgttacgctggaatgctccttagaactcctgctctttattttctggtatcccaattgaacagactggtgggagctggagagtacagagtttattaagctgccaaaaaaaaaaaaaaaagacattaaataatatcctgcaaagaataacagcagtgacaacaacaaaaggcttttccagatttattcattagcactttgtatactcacacaaataaataatataggaaactgactgaaatagcgtagagaagaacatgcttcttcgtgttaaaatctcactacactttcagcacaattgcaaaggcagaatttaatgaacaaatcagtcatacttaccttttaaaaataagtcctgcaaaggccacatgttcttaatctggaagtgcaagtatttgctgacgttttatgattaaacaaatacagagttacagtgtcaaatgtttttgaatcaaattataacattaagcttcacatccttgtgaagcagattagattaaatgttaaatctagtcaaacttctgctaaaacaaaatatgaaaagactccaaagggattcggcatctggatatctcactgtaggttgtgtagcacaaattagaaggcatatcttttataatgaatgccctactgaatgaataccattatgaacgagcatgaacttgtagccaaatggatctgaggtcaaatcccagacactcagtactgtggcttctgtgacctcagacaagttacttaacctatctgtcagtttcctcatctgtaacctgcccctttggaagtgacagctaaaaattccttgagttcagacaggagattattacaggatcatttaaatagaagtaagaattatacttttgaaaaaacttccagtagttgtttcataactcatcaaaataggtttatccgccctgtaccatatgttatacagtgaagatataaggtacaccattttatagtatggtgcttcagttcagtttgtagaaatgtgtaaaactgagaaccaagccatacccttggctaaacactattcagtaggactctgccacatttctgcctcataatggatttttgtttttttcaatggtttttgatgtgatttccatttcaacatcagtaagagtaagttgcttatacgttttaactgcatagttgttgataaagtaagagaaaaatcaagaaataagggattttcagagggctcattacacataaaattcatttagcagagaagtgtattatagggtcttaacctgcaataaaataagatgggttgttttctgcctccctctttcataaagccccgttgctgatgcattgtgtggtccatggcacataattgtttccgccttagtggatatacgcctgggaacactctatctcttaacgccaatactgatgggcacagtttaggtttcatattctatccctggctccagtaaattcaagggtcaccatacttaagatttacctcccaggcttgtcagattttcctcagttacctttatccaaatgttcttttagtagccatttttcacttttgaattgaaatagcaactcaaccaaacaaaggaattcagatgagaaatgtccttggcacgtacaacaatatgacatgtgaattaaatgggaggaaaaaatcctccccgttgtggatctgagcatggacgataatggagttgtgatttagtccatgaaaatgttagacgaagtgagctgacctttagcttcacttactgctgagacaaaatgagaatataaataaaaattaacttcttttaccattttgtgagactttgtaattcattggttttacatttatgtgtagaatgtttagctctataaaaatatgcattattgctaaaagctcaagggattcctatacgtaaatagaaactcagagaaacagagttgaagttacatattttttttttctctagagaagaggtttctaatcctaatacagtggttctttaaaaaatatatgtattagccccattttatccaatttcttacacttgtctaacaattttgttatagccattcaggcaatgataggaaccagcatctttgagtgattccagagctgagggatatagtcttccaattgctttgcttcattctttgtaattcaaattaaggccaatattgctaagcaataaataggtaaatccataaatttaaagcacttcgtgtattatctatttatacttgtgcatatggcatcacaaaaatgtatgggcagatgtttacagcgtatgagcaagtaatttctaattcacttttccgcttacactgagatcagtggaaagcactatgcctgccttgctacagaagtgacttagattcaattcattgagtattttctaagagtaagataggtttaagcaatagaatatgttactaaaggatatgtgttcatgctgtcttgtgttggaaacctttaaagaatatacttgaagactaaacatttattcgtaaagatttaatgggtgcctttctacagtgaatacagtaaaatagatgacccttggcagttcttagatttgatgtaagaaccatgatcaagcaaattgtaaacaacgaccaactcttaaataacttgtttcaaattaataatactttcccatacatactcttgtttaacatttgcaattctttaacgggttggtattattattcgacagacatttagccaagtatttcttgaaaaagaatccatctatcttaattgtcttttgtattactcctttgtgagggctatcattaaaaaataacatggactggtggcttaaacaatacaaacactttctcaccattctgggggccagaagttcaagaccaaggtactggcaaggattggtctcttgtgaggcctctctccttggattgcagatgaatgccttgttcctgtatcctcacgtggtctctcctctgtgttgcacatatccctggtgttttgctgtgtccaaatttcctcttctcataaggatacccatcatattggactagagtaaccctaatagactcattgtaacttaatggtctatttataggctctatctccaaatatgggcacattccgatgtagtaggtggggcatagggcttcaacatggatttcatgggacacaattgagcctgtaacatcttctcttaatatttggcatatccagatatttggtacatatttgttatataataaattcatgatcaatgaatgaatgcattgatggctgtcattaactgtaacctagatattagctgaatcataaacttgctccattatttggatataaagaacactttaagtggcattttttaaatagttatgttaaataggttgcctatgtacctaaaagagtgtttaattacagcaatccctccctccctccctccctccctccctcatccatggttttgctctccttggcttcaattactggcagtcaaccacagtcagaaaatattaaatgaaaaattccagaaataaacaattcataaattttaaattgcatgctgttttgagtagcataatgaaatcttgtgctatcccacctctgtctcacccaggactgaatcacccctttgtccagcgtcttcatgctgtcaatgttacccgcccattactcagtacctgtctaggttcttagaaacactgtcatggtatcgcagtgcttgtgttcaagtcaccctagttttacttagtcatggccccaaagtgcaagagtagttatggtggcagttcaaatatgccaaagaaaaactgtgaagggttttctttatgtgaaaaggttcccaacttaataaggcaagaaaaaaatcgcatgctggggttgctcaaaatctgtggtaagagcaagtctatccgtgaaattgcgaagaaagaaaaataaattcataaatactatatatagggttttgtactacctgcagttttaggcatccacctgaggattttgaagcatatcccctatggataaaggagaactactctattagttttttgtgactcatacagtgaacaaaactgcaatattaaatgcatcccattagtacatctcagaatttcaataaatttgaaaatgttatacaacctggaataggggatctttatttggatttgtattcccactaaaattaataaattatacatttccacctatggggttacaagcttaaaatgctgcttcagtggatactatatgtcttgtagcactagagagaagatgctatatatacttgaaagtcttttttgtttatgaatatgatgctatagcttgagtttgtcccttcttcccttgactgtcttcttcactggagttgatgggctacaataaatttcccacattttgactttgtagatctgcatcatcacgtcaggtagatggtgtagtttatacttaagagataagattttctccatttgaagcttttttctcccacaactaatctattaaccattttgttacgtgccattttacctgacatgcactgacagggtcactaggaagttagctaaaaaaatgcaagtatgttttagaaaaaacctatatatactgcttcgtaataattagatggttgaagtgactaaattcattgatttaagctcgcacatttcctgtgggtatctcgcatcactgtttgagcgctatggcttttattgtaaacataattcaaaataagttgagtagaaagtgaaactacaaaaaattaacagttacattatgctgaaagcaataacattgatatttatgaagaaaaactgaaaactcacttatgattgagctgcatataagtacatgattatgttaatactgtaggaaaatgttgactgccttctgtttacccatgcgtgtatttttttttaagtggtgatagattaaacaatttaagaaacgtgactctcctagtcacttagaaataggtggattagggccaggtgcagtggctcatgcctgtaatcccatcactttgggaggctgaggcaggtggatcacctgaggtcaggagttcgagagcagcctggccaagatggcgaaaccccgtgtctactaaaaatacaaaaattagccagacatggtggtggatgcctgtaatctcagctactggggaggctgaggcaggagaattccctgaatccaggaggtggaggttgcagtgagctgagatagtgccattgcactccagcctgggtgacaggagcaaaactctgtctacaaaaaaaaaaaaaataggtggattattttcatgatgctaatttcatttgcattgtttaaatcatgtgttaatatcctctaggtgggttaatacacatatgtagtataaagtaacatagaaattatgagaccttagacactgagtagatttttcaaaaatatgagttataaacatttttctaactctaattctatataaaataaagcacgtcaatattttatgatttctagctttaaaggtccaatatatatatgagaaaataagtttcttatttatatgaaaaagttacaaaaagttgaaaattcaggctataaagtgcatcataatgaggttgagctaactgccattttgaaatgcttcctttgcatagaaagcatcacaatatttgttttccttccaaaaatcattgatagttggtttatgttacatattaaaatagtgtgtgttcttagacattagtgacatgttaatgatatagtagtttttactcagagattgttagttttctcactagagtagtttagaaacagaaaattttaatacttttgtaataattgagaaaattgaaaaatctacatagtaatagaatttaagttactaagaattttcttctacaatccaaatggtaggcaattctcattatgcaagattgtttcaattaagagtcttttgaggcattctatttagtagttagacttttattctttagggtgtattttcaaacctaaggaaaatacaccttttacttgttctcactgcaaaatcctctctatatgtatgtctttgttatcttacatttgctatggagccattttatatagtggtataataaccacttcatattgcttgtctctttgcttttctatgaaaggtacaagacttggtgagataaagacaaatgacagtcacaccacttatttaaatgtaagcagatcagaaagagtgtcccttccaacttctagcgtacataggagactgagatactttggcaaattattcatgccatttttaataaaacgtagttaccaattgtttgctgatgctgtgcttgattgtctcttctccaggtattgggagatcgatgggcaaacatctgtagatggacagaagaccgctgggttcttttacaagacatccttctcaaatggcaacgtcttactgaagaacaggtgtgtcatgtgtgagaaactagctgtaaaagacacggggggatattaaattggaaaagtaaagatttatgtttatttattccttggaattctttaatgtcttgcagtgcctttttagtgcatggctttcagaaaaagaagatgcagtgaacaagattcacacaactggctttaaagatcaaaatgaaatgttatcaagtcttcaaaaactggccgtatgtactttctagctttcaatggtcttataaaaacccagtactgtatattatcactattatttagtctcttctatgctattgaatattaaatgtttatttttgcttggatcatagattattcaaagatgttatattgctacttttctgaattaaagtgggaaaaaactataggtggattttcaactttgtttttcaaagttgtactcttgataaaacatagcataccagaataagacttcaattaaaattaataaagtaatactaagaaatgtctgtgagcctttcataaagttctaagcagcatagttctaaaaaaatagactgacgttgattctcagaataatatgtgagagttacaagcgacggttatcctgacattgatggagtttaaccttagtttattataaaggggtacctgagactgggactgggtaacttatgaaataaagaggtttaactggctcatggttctgcaggctgtacaagaagcatgacaccagcatctgctcctggtaagtgcctcaggaagcttacaatcatggcagaaggagaaggggagccagtgtatatcacattgcaagagtggaaacaaaagagataagaggaaggtcccagactcttttaaacaaccagatttcatgtgaactaactgaatgggaactgactcatcatgaaagggattgtgctaagccattcatgagacatccgccctcatgagccaatcacctcccaccaggccctacctccaatgctgggaatcacatttcaacatgagatttggagaacagagatccaaacaatatcacctagtttttcaagcaaaaaaaaattaaagcctatcaaatgacattgattataaatacctcgagtgttttgagaatgagatttctttggcaataaatggatttcagaaaagacttcattgaagcatttggtttcagcaggaatttccaagatttaaaaaaaaaaaaaaaaactctaaagtttctcttactctgtgaattttatcatttctagtaaaagaggccggtctgatactatgagtttaatttttcacgtgacatattctactttatgatttcttaaaatttttgatagatttgattaaatgttcatttgatatgaacttttataaaacaaaatggttgtaagtagtgttccataatttcacctttattattgcattgtacttcataataatgcaataatttctaaacttaagtaaatttttccactcattttaaatacgtaccattttaccagctatttatttgtttcatacattttttttgctccataaatgctaaccctcattggtcttttaatttaaaatagattcacttatgtattacttgttattacaagctagcttattattgataagaaattattgctcaaagaatatggactttattaagtgatgtgactgccgaaaatagagttcagaaaagtaacctgtatatgtttgaaaacacgagtgcaaaaatatcagctgtatttgtagttttggcctgcagctgatggggagccattgagagtttgcaaaagaatcatatttgcatttttgtaattctttttggtaggaagatgtttgatggtacgaggactaatcagaagacctgaactaagtagcattgggcattaagataagaagagaaacattagaatgttaagatgtgatgaatgaaacttgtgataagaggcagaagtttgaaatggttcctagacatttcatttgggtgactgggttcctaggagggttattagccctaacaggagaatagaagaggaattgctggaatgacaaaaatgataattatttcagatttggatatattccgtgtaaaatgtctttgagacatccaagttaaaaatcctttccattaatcagttggtttacacaactagaatctcagaaaatggttcatgactagttattgattcagaagcaatcaaaatgcttctgagggattgtgtagagtgacacattaagtgaaacgaatagatttcagggaggaatgtctacaatcaaggagtaggcagaggataagatgttgaccaaaagattgagcagataccacaaggggaaagtggtatcacaaaagtgaggagaataaagatttcaaaaaagtaggaagtggtacacactgtcacatgccacagagaggagaggataaattcatgagggattctatcatatctagaggaatggatgcatggattacatctccttaaagcagaatattccttacaaacattgttcttctcaggcaaaatgtgaatcctttcagtaaataagtgagtgaccactgattatcaaaatgcagtcatgccctctgattaggagcgaagatatattgctagttaaatacagaatcatgtgcttcagacggtcaatcataatggtgatggtcagtcatattctgtgtgctgaaaaagtcacaagcctgcccagattcaaggaaaagggaattagatttcatttcctcatggagaaacaccaaggtcaagttatagcaaagcatctgagatgaggatattttacagccatctttggaaagtaccacatgccagaatagtacagttattttacatgatgataaattccaaatcttaatatctagtcaaagttcctgcatatattgttgactagatttaccaatcaagaaagttgttcttaggaagccacaaactgacaaaatccaaatatgttaaagctagatgagattttgcatctcatctagtgtttcttcaatctcattacacatgtaaagttcattaggaccatctactcagtttgtttccaagagaaaatcgagatcaagaaaaaacacaggatctgtatcctacaacattagtatcagacttaaaatgaacactaagacatccagactcaggtccaggcctttcaatctatttcagtagtcctcatatcagttgattccttggaaaaaataactgcaactgagaactgtcatttctaacaataatgtgcctctatgttaacatttttgtgagcagaaatcttggctagcctcagggccataaaaatgctcttttaagaaagtcaataattttccaataggattaaaatttgtgttatgtcaccttgcttgtgaacaaagagaaaatatgttttctataggtcttgtcatttgatagtttaagccaattaacaaaacctgacagctggtctagaatttgaggtaaaattcctttgctgactcaggcagtgaataagaatttaatgttcattaaaatatgtcacaatctgagacccaaaacaggtaccatctgtcaccagttttcactacatgtctaggtatagatacactgtgctaaactctcttctctttacaataagtgtaatttgtttcaaaatagtatcactgataacccatgggattgtgtcctgcttgccattgaggtgggaggtggggattatgacatttaatttgctctagatctttgggattcatatccaaatcatgtagatctattattttttataatcaaaactgatttaagttttaaactgatttggcatcagggataaaaatgaagggaaagaagaaacagtagcttttatgaggtgaattataagacttgtagaatcacgtaaattatcgtgggaagatccaagtcaagaagaaacctgttcctgagtaaatgtatttctgctgtggggactgttggcgtttgctggggaaggacagctctggggaagcagggtgatccaagagattatggtatataagggctacagaagtacttaggaattgaagatattctcaaatggctgtgggatcaaaggacatggatgaagtgctcatggtaactgagcaagttcctgtttgacttgctacctttacctcaactcctgggatggccctcaaataattaattcagacaggatcaatgcttctcaaaatgtgttcccccgaccggcagcatcagtatcaaggaaatttgttaggaatgcacattgttaggccatcttcagacctactgatttagaaactctggaagtggagcctagtcatctgcattctaacaagcctttcaggtaattctgatgttctttcaagatgagaacctctgtaatagatcaacctcccaaagtacaactggtgattagaatgaattggagcacatcttacatgtagataagtaactacacataatataggtggaaaactcaattttgccaatataggagaaattgtcttggcattattctcttatgcgtattcctgatgagagtgaggtgaaggtttcctgggccttttgtaaggatacattatcttttcacttcaaatcatcttgaacagcttatctgtctcttctccatatccactactgacccagtctgatttattgactgtaccttcctccctaccttggaggtaggtctacattcctggcttctataaaaataaagtctgtttattcttttactatcccagctggcctttgccttgtacacattctctagatcttccttttgccacctgaattttctagagctctatgggtctctggcactcatagacctatggttaattattgatatgtagaaatacatattttatgcaataattagtaacaaatcatagttatttaatatgcacatgtaagacctaagcttaaaagaatcagcatcaatggatagacaggacaaggtaattctaatgaattctatgatctaatgtatctggccccatcatggattttctttcttttcctccctcagttaataatcctgggggagttctggaactgggagatgactactgaaagacagaaaaagagagagaaactgagaccaaacaactaatctgccatcatcatttttgatactcatatctaaaatttactaggtataagtctgggttcagtgtttttgtcatacagacatataaaaattcatttattcaataatcacacaatgtaattataacattgattttactttaccttgagtgcacttttttcctaattggatttttttttttttcttgagatggagtcttgctctgttgcccaggctggagtgcagtggtgtgatctcggctcagggcaacctctgcctccctggttccagcgattccttgcctcagcttcctgagtcgctgggaccacaggcatgcaccaacattcccagctaattattgtatttttagtacagacgaggtttcactatgttggccaggctgatctggaactcctgacctcgtgatccgcccgcctcagcctcccaaagtgctgagattataggcgtgagccaccacctctaattttatttttaatggtgactttcactttcatttttgtaatgcttaccaaatgtttcttcatgtggcttaataataaaacaggaggcttattttcatttgtttaggtaccatgaggttactcataggtttttattgcaatcctcttctttaaacataattctcacactcctcttctgacatgtttccaaatcattacatattttgtttaaataatgggtagaccattcagccttacacatatggctatttaaaatagtttctaacattctgagtaagtaagtcaaagaggattgtacttagattttttttttatttttagatttgtgtctttgtgtatattgtgcctctttccatagtaaagaaaaaaaatgacactataactggaggaatatacattgaaattcaaatatggctctcagcttgggacaggtagcatcaacctttgttctagtactaatgcaaatattcacttaaatttaatggaaaactaacaagtgaattaaacaaaatgaatatgcaaaacctatctattgggctgggtatggtggctcatgcctgtaatcccagcactttgggaggccaaggcgggtggatcacttgaggtcaggagattgagaccagccaggccaacatgttgagactcctgtctcttctaaaaatttaaaaattagctgggcttagtggcatgtgcctataataccagctactcgtgaggctgacaggagaattgcttgaacctgggagacagaggctgcagtgagcagagatcatgccactgcactccagcctgggcgacagagttagactccaactcaaaacaaaaaagaaaaaccacctacctattgctaaacccccacaccgtgagttttattttgatttgaattcagtgtataatatcttaatttgtattttggtctattgcattctttcaaacttagaaaaatactgaacttattgttaaggaaaaattagagatgaaacttaaatcttgctttgtttccccttaaaaatggcatgaagactgaactataacatactccaggtgaagcagattctgagtaaaagacaaactaattgaaggagccactagagcattctgcagttcagagctatcaatgcaggtgccatgccaaaatgggctacttagattgtccttttcaggaaggtgtattgactgctctaggtttggggcactttgcttcatgggcaattggtgcatttgtgtcatgacaatttgctctgtggtatgttagttcttaaataaacttacatttgtttcggaaagacaggtatcgcgatttagtttacattcattgtatttgctgccaaatatggggttgttaagtggctgtaagataattttctcctttatttctcttccttcttctcctttgtttacagattaagtcagggagtaatgttcagtacccaggaattgaatttgtctgtgtatcaggcaaagttactgagtcaagtaaaagaaaaactgccctgatttactgatttcacataaaccacttattcctttcaaatcaaccaaagggagtttgtaaccctccacagctcacaggaactttggaaatataaatggtataaaaattgcttcataagacacataagtatttataaactctgaaaagagatgctgaagcatttatgtcatgcccagcgacttagttcttttacttaatgggctctacaattagttttaaaaaataattactcaaataaccagatgttaattgattaatggatgctacaaaaattttatggtcagtaaatcacataatgagattttatctccaaataatgaaccgaatgttaaaactgtggaaacaataatattgtaattttatccaaataatcacagcatttcagaatggcaagtttccttagccattctcattttctcagctcactagcttttcttcagtactcctggtacctgattgtcagttttcgtttgaattccgtcaggaattaaggggaaatccaagatccgtgccttctaatttccacatgttgatctctgttttgccttttgaagcaatattaccttttcacttggattttcttcaaatatttcaaggtagctcttaattacctctagtaggtctttattctacgtttgagtttcttttctcttcttttctcttcaaacttcttgggataattagatagattataactttctacctctatttttctgaacttttgatcctttgcgggcacgattgaaatattttcttatctatgcaaatgagcaaatacacgcaaaagcagattgaactatagtggtgtatggaatgcaacccaggcttattctgtgatctttcttgttttaacaggttttaaaagcggatctagaaaagaaaaagcaatccatgggcaaactgtattcactcaaacaagatcttctttcaacactgaagaataagtcagtgacccagaagacggaagcatggctggataactttgcccggtgttgggataatttagtccaaaaacttgaaaagagtacagcacaggttagtgataccaattatcatgctacagactatctcagagattttttaaacctgcattaagagagtgacattataaccctacaaaagaagcaaccagattagtttttgccctgtgtttagttaaataaaaacatgattcttttgcctgtcttgttgttggagaatggtggtgaggtagagtgctaattaactgaacttgttactgccctagagtgaatttcttccagcccaatagtaacggggaactgagtgacttagagcaggcgaacaaaatgctgggaactgtataatcacagtctaaccccaaatcagagattgctagaaccacgaggaacattagccaactccgttttactcttgagaaaaatgaaacttagggaagaaaagtaaatttttcaagagaagttagtggtaggagaactagggttcaggtcttttgatttcttggaaagttttttattagtgtagttaattatctgactattgtaccttttctgccatagactgctgatttcataaaattatgaatgtggcttagttatactaacacatacgggctgtagattatgaaaacatctcagctacatttggggtatgtggttttattataataatttttaaagatttagtcactaaaatggggtatcgttaaaagttgaacctctttttgtcttatgtagttggatggtagaataatgagtagtcattcaagatataaacattatatataatagtatttaacatattctgccacatagcctggcattataaggaataactttactcaaaattcatagctcaatgcacaggcatacacttccatattcaatagattttaggcaaatatttcctctatattgagacaagtacatggaatttgttttcttgagacctgacatctgataagtagcacttaggaaatgccttttggagacatgaagtttgtagtattgcctccaggaatacaatttaagacagcgtaataaaccagcctatatgattttcaatcacagttcaatgttacttttaatccaattttacgttaaaaaattataatttgaagaaatatgaatataaattgtaataatttcccacacaatcattacataataaaaactccatttgttttccattaaacatactttagcaattaattgacctaatagtagttttagtactatattatgattcctcctgttttatgtgatctgcccatggcttctttgcaatacattggtatttatgtaataaatacatgagacattagtcaatttgatactttttaacccaacactgagagtattcccatatgtacccattgcttccacagattattgctgccataaaatggtcagttgccgtgttaagaaagattgccattatttgataaagaaagttattttgacgtgcatcccttttaagggacatgtttagggagctgtaacagttaactgtaggtcatcttctagttcatttgcattgcatggagtggttctcaaacttgagtctgcatagtagccacctgaggagctaattaaaatgcatattcctaaacattttgctcagaaaatctcatccataagctgtgataaggacctaaaaatctacatctttactaagcctttgatacaatctgcagaccatagaggggatcaacatacactgggatctacttgaggtgggagggtgggaggaagtagatgagcagtaaataagactattggatactgggcttaatacctgggtgatgaaataattggtaagcaaacccctgtgacacacatttacctatgtaacaaaccttcatatgtactcctgagcctaaaataaatgtttaaagaaaatagacagtgatatgtgtgtgaatcccaacattctggttttccacaatgctccctgaaatgtgaaaagggagagcttcttgggaatacactatataaatatgctcattcccttggaatgggactactttttgatgaagtttgtacatgtcatcgaaatattactgatttgattattccaattggtagaaaagcatttgaagccttatttttaattccctagaaattatgagaccaccacctaggcaattgacgtgatgtcttccaacttgtataattctataataaaagaatactggttttgatttgcatggttctttatgaaataaagtccaacatgcattacagcatgtatctcttcacttgctcatagggatacaatgaagataaaatggaggcatagacaagaaagcatttgaggggaaaaaggttgagtttgatatgtaagtcatgtagttcagtgtgtctggagggctttttgtggttctctatctgcttttttttttttttttttttttgagatggagtctcactgtgtcacccaggctggagtgcagtggcacaatctcagctcactgcaagctctgcctcctgggttcacaccgttctcctgcctcagcctcccaagtagcagctgggactacaggtgcctaccatgacaccccactaattttttgtaattttagtagagatggggtttcaccatgttggccagggtggtctcgatctcctgaccttgtgatcctcccacttcggcctcccaaagtgctgagattacagacataagtcaccgcgcccggcccactatctccttttaattttattttcaaacagttacacgctcctattgtgggctagaaataaataaaaggacttaacatcatgtaagttgttttccagaacactaagcttgagtttttcttaagcttatgtttcagttttctctcattgcctttccaaaaattatgctgtcatgggattgatccaaatctttgctggctgtttttgagctcacaggaaggtagaaatggagctactcaggaaaagagaaattaaaaggaggtaaacagagacaacagcgaaatagtatcatataagagcaactgattttcttttatccatgttaaattgaccttgattaaaattacataaggagaattccaagaatatgagctgtaaggttgtgactttgaagaacaaagctcacttgtatgtacattttctataatgattgtgggagaaaaatgagtttcattaatgactactcacatgatatactcaattgtttcaaaaattcttttaaataattagtataaagaatgagcaaagttctcataatggttaaaacctattgtgaggcagggtgtggaaatcgtgattgagatgacaaggcacccagttgtactcatataaagaacactgcttgcgcgtatgattgctgttcaggtcagagctttgaggcatttttgaccttttgaagcagttgcatggcaagagatcaaaacgtgaaaaaataatcagctaggaggactgctctcttgcatttcaaactcagatttgacttgaataatacctggacacaagctgagggtatttaagttgattagaaggtagcctaagaagatagaaaatactttttttctaaatgttggagagataataactcttgctatctggaggcttacaatgagaaaagagggcaaatataccctggattgacttctttaaaaactcaaatgatcatgattccctgtaattttttataaacatacttgtaatttgtgcagttttttctaattgccttggccctgatcgatatatattttatcttgatcataattatgaaatacgatagtgacgaattccatcaacatttgcttgtctggaaaagattttattcttccttcacttatgaagcttactttgtctggatatgaaattctgccttggaaattcttttctttcacggtgttgaatattagcccccaatctctactggcttatagggtttctgctgagagatctgctgttaccctgatgggcttccctttgtaggtaacctggcctttctctctggctgtccttaacattttttctttcatttaaacctggagaattgtatgattacgtatgttggggttggtctgctcagtatcttgcattccctgaatttgaatgttgggctggcttctgctcagtgagtatcttgtatttcctgaatttgaatgtttggctggctttctagattggagaagttctcctggatgatatcctgaagtgtgatttccaacttggttccgttctccccgtctctttcaggttccccaaacagtctttgcttcagaatttacataatcccacatttgtcagacgttttgtacattcatttttattcttttctttttctctaatcttttctgcctgtcttatttcagcaagatagtcttcaagctctgagattctttcctctgcttggtctattcaggtattgacaatgtgatttcattgtggagttgtcgtattgcgtttctcagctctatcaggtcattcatgttcctctgtaaactggttattctggttatccgctcctgttacgttttatcgtggttgttagcttgtttgcattgggttagaacattctcctctagctcagggaagtttgttattatccacctttgaagcctacttctctcaattcatccatattagcctcagcacaccatctcacgccagacagaatggtgatttttaaaaagtcaagatacaacagacgctggcatggtttcagagaaatgggaatgcttttacactgttggtgggaatgtaaattagtttatccattgtggaagacagtgtggtggttcctcaaagaactagaaccagaaatacccagcaaggccgttactggatatatacccaaaggaatataaatcatcctattataaagatacatgcatttgtatgttaattgcagcactattcacaatagcaaagacatagaatcaacccaaatgcccatcaatgatagactggataaagaaaatgtgatacatatacaccatggaatagtatgcagccataaaaaggaatgagagtatgtcctttgcagagacatggatgtagctggaagctgttattctcagcaaactaatgcgggaacagaaaaccaaacactgcatgttctcacttataagtaggagctgaacaatgggaacacatgggcacagggaagagaacaacacacactggggcctgttgctgggagaggaggagagcatcaggaaaaatagctaacggatgctgggctcaatatctacctaatgggtctgtaggtgcaccataccaccgtggcacacatttacctccataacaaacctacacatccaatacgtgtaccctggaacttaaaaaaataaatgtgatagtaagaaatttattataattaatattttaaaatataatgtatgtgatttgaagcattactttcctcatttgactgaaatcacatgtgctgttgaaagggtatattagtcatatgctttacaatttggtatgctaattgtaattatcatattacgccataaattgtaattactgtatttaatatgtaatttatattaagtagtatataccaggtgctttggtgtaagcatatatatatatattttttttttcaagcgagtctaaaggttttgtagttttgtggatttttagtagaataaattgtcttctttctcaggaataaggaaagttgtatgacttattaaggttcaaatatctcattcccattttgtgaatattttgctatattgctaacaacaatttttgcaacattctcaactgtgagcacctctttaagataaaatacatatgctcagaatttgcctcttcttgtacatggcagttcatgtttatgctgtatatgtttgtgcctacattcaaggatgcccaaaaagagaaaatgattattatataattatgtgtaccttctatatcatctatatcctgatgagagatttattatgtgtgctgccgaagcaagcacctgatgggagatttaaaactcctatcaaatagtaatataaaacatagctgtaaatgataagccagtgctttttattatacccaaaatgcaaatagaaatatgccaatgtaccaagatgaaaatttctttacatgttcttcttttctgagttaattctcattctttaaagatcctctattttaacccttcataaaatattttatgttcacgttctggctgtacccattctcagagcatcattttgtagacctctttgtacaagggggatatagttgcaaatggtttgcctctcttcttttttggccagtaagtttaattaaaaatactctaaggctttttatttaaaagaccttttcattgcttcctgaaagctctccacgactagtaagcctgatgccaattaaaaaagaaaataattttttaaaatctggaattaaaataaaaataccttacttattttgtgtttccttcttacttaaggtcatagaattaactcccttaaatttgagaacatgttttgggtaattcctcaggttaaagttttattagaaaaatttgaagttgaccgagtgtggtggctcacacttgtaatcccagtactttgggaggacaaggcaggcaaatcatctgaggtcaggagtttgaaaccagcctggtcaacatggtgaaaccccatctttactaaaaatacaaaaaaagtagccaggcatggtggcaggcgcttgtaattgcagctacttgggaggctgaggcaggagaattgcttgaacccgggaggtggaggttgcagtgagccgagatcatgccactgcactccagccgggatgacagagcgagacttcgtctcaaaaaaaaaaaaaaaaaaaaaaaaaaaaaagaaaatttgaagttacatctcaaataactttggaaattaactgtatcattttgctatctccaactataataggtatttgagaatgggccttgtatatcagtgcaataggttttaccttgtaaatgcattgtctgtaacaatataaaatgtaagcactaaaaaatttaatacattcagtctgagttaactcttggaatctctcattctttatttataaatttaaaggaaaggtaagctaggcagatttctatagtggccatcgagttctaaatgtctttgatatgtttctctttgcttttatgtgaaactctggagtacttagtgaagaagattcctacttttgccactggaaaggcagctaaaaaataatgataataacatcctatccctattcaaaggagacttaattatgaaattattacactgtattcactgagtatgtcattaaaataccatacagacaaaatgctcagcatctgtatgatacgcctattatctcctgacaaaaaaatgaaataacacataaagacaaatacaagtctttttcctaagcctatacttgataatatccatccctaattatagaatgtgtttcattacttcagtgttagatggtatgtagaggaaggccagatggatcagaaaaattaaatctcattgctttgcaatttttgcaggtgcagttaattcacacagttgctcaaattccgtatttaatatgaatccagaagacaacatacatctcttctttctgatacaatttgtactaaagacaatttaaaatgaggaacaaaatacattaaattggacagacagttttacagaataaaccttcttaattatcatataatatttatttcgaagaaacaaatgacttatgatgccttctaagtatttgacaataattttgctcatgatttcaatgtcagtacttattcaagaaattttattaccttacagtaataaattaattattaatataaattaaattattattaaattattgtaataataaattaattacagtaattaatagtaaattttagttaccaggctactgtcctgaactttggcactcattgtatgctacattcagctatgggaagtcctctatacttcataagataaagcattttacatccttgtgattagtaactcagcttcctttgtgaccatctgatcttttgcccaaggattctcccaaagttcaacatataaatattttcttttgcttagagatgcaaatctttaccagatttttgtgccttgtgctaccatgcctgtggagttggtttttaagcatggctatcaattattatctaaagctgttgctatgattatgcagtatgttttaaactgcagaagtgcaattcctccatgcccattaaaacttattgatcactccaaagggttacatatacatagacagacaacgcaatgaaaagccttgatccacagttgtcaacctgattgtgtgtgtgtagtgtattttgactaattttgcacagatttcaatatagcatgtcaagagccaaacatatttaacattgagtaattcttcctatataatagttatgatgtgccattgtttacaatttcagtattctgaatttatatatgtgtgtgtatgcatacaaatacacaccccttaaaaggaaaccaccattcaaaaaagtgtacaagtgtaggagcaagtgagcatagctgataagagttggatgaatgaacattcagacttggatttatatctatgctttgctactaaaaagttttatctgcctcaacaaggtcactttcatctataaaataggaataatattagtacttactcttagggccattgtgaggtcataatagctaccatttattaaagctttacaacatagcaagggagtttttctagatcttttgaataagataatcaattcaaaacacttattgtaatgcctggatcatgcagaaagcttcataactggtacctgttattgcaagtattagtatttgcaaaataaagattttatgctaaattagtaactaatactttatagcttgaatctttctagtaagtatctaaatattcaaatactagaatatctcaaaaggcaagaagttgaaatctcttatcccagcataacaaaaaagttacaaaggcaataatatgtaaataattaaatggaaagttaaaagtttcaattaagaatatcagtcaaaaataaaaggaaaatttattagcctgttcttacactgctataaagacatacctgaaactgagtgatttatgaagaaaagaagtttgactcgttcgtgtttgtggcattatagtattccttggtgtaaatgtaccacattttctttatcttgtctatcattgatgagcattaaggttgattccatgtctttgctattgtgtatagtgttgcaatgatacacatgcatgtatctttataatagaatgatttatatttgggtatatacccagtaatgggattgctggcttaaatggtttttctgcctctaagtctttgagaaatctccgcattgtcttccacaagggttgaactaatttacactcccaccaagagtgtaaaagtgttcccttttctccacaacctcaccagcatctattgttctttgactttttaatagtaaccattctgactggcgtgagatgttatctcattgtggttttgatgtgcatttctctcatgatcaatgatgttgagttttctttcatatcgttttaggtcacatgtatgtcttcttttgagaagtgtttgtttatgtgctttgcccactttttaatgaggttatttgtttttttcttgtaaatttgtttaagttccttgtagactctggaccattgtcagatggatagatggcaaaacttttctcccattctgtaggctgtttatttactctgacggtagtttattttgctgtgcagaagttctttagtttaattagatcccctttgtcagtttttgcttttgttgcagttgcttttgccattttcctcatgaaacctttgcccatgcctatgtcctgaatcttattacctaggttttcttctaaggtttttattgtttggggttttgcatttaagtctttaatccatcttgagttaatttttgtatagattgtaaggaagaagtccactttcaattttctgcataggactatcccagcactatgtattaaataggcagtcctttccccattgcttgttttttcaggtttgtcgaagatcagatggttgtaggtgcgtggtcttatttctgagttctctattctgtttcattggtctatgtgtctgttcttgtaccagtaccctgcttttctggtgactgtaaccttgtagtatagtttgaagtcttagcttttgggctgagacaatgggggttttctggatataggttcatgtcatctgaatacaaaaataatttgacttcctctcttcctatgtgaataccctttatttctttctcttccctgattgccctggtcagaacttccaatactatgttgaaaaggagtggtgagagatggcatccttatcttgggccagttttcagggggaatgcttctagcttttgcccatttggatgtgggtttataatttatggctcttattattttgaggtatgttccttcgatacctagtttattgagaatttttaacatgaagggatgttgaattttattaaataccttttggttgtctattgagatagtcatgtggtttttgtctttagttctgtttatgtgatgaatcacatgtattgatttgcatgtgttaaactaaccttgcatgctagggatgaagcaaacttgattgtggtggataagctttttgatatgctactggatttggtttgctggtattgagaattgttgcatcagtgttcatcaatgatattagcctgaagtttgcttttctttctttctctctttctttctctctctctctctctctttctttctctctccctctctctctctttctttctttctttctttctttctttctttctttctttctttctttctttctttctttcttctttccttctctctctctctctctctctctctctctctctctctctccctccccctccctccctccctccctccctcccaggttttggcatcagggtgatgctgacctcataatataagtttgggagaaatcccttcttttcaatttttttggaatagtttcagtggaaatgataccagctcttctttgtaccgctagtagaattcagctatgattccatctggacctgggcttttgttggttggtgggatatttattattgcctcaatttcagaacgcattattgatctattcagcaattcatttcctttatggttcagtcttagaggggagaaatgtgttcaataatttatccatttcctctaggttttctagtttatgtgcatagaggtgtttatagtattccctgatggttgtttgtatttctgtagaattattggtgatattcctcttcaaatttttcattgtgtttatttgattcttctctcttttcttccttattagtctaactagaagtctaccttttttatttttatttttttccaaaaaccagctcctggattcatttagttttttggagggtttttcatgtctttatctccttcagttcagctctgatcttggttatttcttgtttgtttgctcttggtttgctagtttttttatttgagatgttaggctgttaagatctttctagctatttgatgtgagcatttagtgctataaatttccctcttaacactgctttagctgcgtcccagagattctgataaattgtctctttgttctcattagtttcaaagaactgcagaggtggcagctggtcttcctcccagaagctctgtcccagggagagatcagagctctatccattgaatcctgggtggaatggctgaagccccctcagggaggtcccacccagtgaggaggatggatcagggtcccacttaaagaagcagactggccacgatctggcaagggttgccacacactttcaaacaaacaaatctcatgagaactcttatcaggagagcagcaagggggaggtccacacccatgattcagtcccctcccaccaggcccttcctccaacactgaagacagaattcaacatgaggatttgggtggggacagagagccaaaccatatcataaaataacagcataaacaaaatgaatttaaaattaaagaatagctgaatagttcgtaattgcaactacagtcatatgctgcataacaacatttcagtcaacaatgaaccacatatatgacagtggtctcataatattattatactatattattttttacttttatttttgcttcagaggtacatgtggtggtttgtcatatagataaattgcatgtcacaggggtttgttgtacagattatttcatcacccaggtaataagcatagtacccaataagtagtttttttaatcctcaccctcctcttaccctccagcctcacatagaccaccgtgtctgttgtccccttctttgagtccgtgtgttctcaatgtttatctcccacttagaagtgagaaaatgtgatattttgtgttattgtgttagtttgcttaggataatggcctccagctccatccatgtttgctgcaaagaacacaatctcttttttcatggctgcatagaattccacagtgtatatgtaccacattttccttatccagtctaccactgatgggcatttaggctgattccatgtgtttgctattgtgaataatgcttcaataaaacatacatgtgcatgtgtctttagggttgagggatttatattcttcttggtatacccaataattgttattgctgggtcgaatggtaattctggttttcgttgtttgggaaatcaccaaactgctttccacggtggctgaactaatttacactaatatcagcagtgcaataaacgttcccttttctgtgcaaccttgccagcatctgtgattttttgacttcttaataatagccattctcactggtgtcaaatggtatcttattgtggttttgatctgcacttctctaatgattattgatgttcagcattttttcatatgaatgttttctgtatgtatgtctttttctggaaagggttcatgtcctttgcccactttttaatggtgatgtttggtttttgcttgtaaatttaagttccttgtagattccagatattagacccttgtcagatggaaagtttgcaaaatttttctcccattctgcaggttgtctgtttactctgttgatagtttcttttgttgtgtagaagttctttagtttaattaggtcccagttttcaatttttgtttttgtttcaattgtttttggtgtctttgttatgaagtctttgcagtttcaatgtccagagtggcattacctgggttatcttcttaggtttttatagttgttggttttagatttaagtctttaatccacctcgggttaatttttgtatatggtgtaaggaaggggtccaatgaataggcagtccttttcccattgcttgtttttgttgatttcattgaagaacagatggttgtaggtgtgcagccttatttctcgactctctattcttttccattggtttatgtgtctgttttttgtaccatgctgttttggttactatatccttgtagtatagtttgcagtcaggcaatgggatggttccagcttttttctttttgcttaggattaccttggctattctggctcttttagtggctccaactgaatttttaaatagtctttttcttattcagtgaagaatgttattggtagttttttgggaatagcattgaattaaaaagtgctttaggcattatggccattctgtcaatattgattcttccatgagcatagaatatttttccattttttgtgtgttatctctgagttacttgagcaatattttgtaattctcagtttagcagtgtttcacctccttgcttagctgtattcctaggtatcttatttctttttgacaattatgaatgggactgtgttcttcatttggccttagcttaaatgttgttggtgtgtaggaacactagtgatatttatacattgattttggatgctgaaactttgctgaggttgtgtatcagatcaatgagcttttgggcagagactatggccaaagtatagaacctcatcgtctgcaaacagggataatttgacttcctctcttcctatttggattgcctttatttctctttcctgattgctttggctaggatttctagtactatgttcaatgagatttgtaagagagggcccccttgtcttatgccagttttcaagcacaatgcttctggcttttgcacattcagtataatgttggctgtggactttttaaagatggttctaattactttgaaatatgttccttcagtgcctagtttgtcgaggatttttaacatgaaagggtgttgaattttataggatgccttttctatatctactgaaatgatcatgtggtttttgattttttgttctgtttatgtggtgaatcacatttattgacttgtgtatgttgaatcaacctcgcaaccctgggatagaagctccttgatcatggtggattagctttttgatgtgctgctggattgggtttgctggtattctgttgactatttttgcatctatgttcattagggacattggcctgaagttttcttttttggttgttgtgtgtctgccaggttttggtatcaggacaatgcttccctcatagaatgagttaggaaggagccgctcctcaatttttgggagtggtttcataggaatgataccagcttttccttctatatctgttagtattcaggtgtgaatctgtctggtcctgggctttttctggttggtgggctttttgttcctaatttaatttcggaactcattattggtctgttcaatgattccatttcttcctggttcaaacttggaaagttgtaagtttctagcaatttatccattgcttctaggttttctagcttgtgtgcataggggtgttcattatgaatagtctctaagggttttctctatttctgtggggtcaatggtaacatcccctttgtcattttttattgtgtttatttgagtcttctctctttttttctttattattctaggtagtggtctatctttattattaattatttcaaagaaacagctcctagattcattgaccttttctgtgcttttttgcatctcattttccttcagttcagctccgattttggttatttcctgtcttctagctttggggttagtttgctattgtttctcgttccttgtgatgttcgttttgtaattagagatccttctaactttttgatatgggtgtttcgtgccataagcttgcctcttaacgctgctttgtgtgtgtcccagagattctggtatgttacatctttttaaattttcattagtttcaaataatttcttgatttctgccttaattttattgtttacccagaggtcattcaggagcagtttgtttgatttccattttaatgtatggttttgagcaatttgcttaacattgatttctatttttattgcactgtggtccaagagtgttgttggtataattttgtgggttttaaaaaaattttctaaagattgttttatgcccaactctctatatcatatttttattgtacctttcgatatgtttggatacacaaatacttaccattgtgcctacactattcagtatagtcacatgctgtacaggtttgtagctaggagcaataagctgtaccacataggttggccgtatagtagtctgtaccatctaggtttgtgtaagtacactccacggcgttcgtacaaggacaaaattgtctaaggatgaatttctcagaatgtgtcccagttgttaagttatacatgacttgtagtgattcctaataaactggagacagtggtagaaaaaaagtattttattttattgtatgtccttttgtattctttaaatttgctttgatgtacttatgtttctttttttaaatgtgcattttttaaacaagtggaagagaagatggaaagaaagaacttcatttcttgagcatagtttgtttttcccaggcctatcaaaataacacaatcttactgcaagaagaggcacaccctggaataatatcaggatgctggcaaatgctcttccaatttttctcagaatgagaaaatgtaaattttaaagtttaaatctttttaacatatgtaatcttatgagtaagaaggttgagtatagaaaaattcttcaaatttccctgagcgtttagaaaagatagtggttactgctgatatttaccattatagagcacttattttattcagatattatatcatttaattctcaaaaccaggactggctacataatttgtgggcccagtgcaaactgaaaacaagggcttcctgttcaagacctaagaatttcaagacagtggaagcagagcttgaaaacaagcatggaagcctcctgagcaggggccctgggcaactgcataaattaccagcccatgaagctgtccttgcttgtaacacacctgtgaagaaatgtgttactcttactttaaagatgaagaaaataatgcatagatttgagataagaaccaaccagccccaaatgtcacagtgtataaactatggatctggtgtttaataattgtggagactggctccaatgcctctacttataaccactctaagaggaatcagctcccaaatgtaaagacaagtatttctaaactatttcccatttttactagggaaattaacttgcagttaaaatgaatagtattttaaaaagaaatgtattttcttttcatgatatcattttagagtcttaaatagactcataatcaaaatgaagaaaggtgactgggtaaaagtatagttagctagatacaaagattgttgaatataggtcaaactatattctattctagttttgactctgccatattaaacattttagtgaaggcactacgttattcttatcatgcttgaagttttcctcattctaatgcattgagtgacaggagtatgattccatagatcttaatatataaatagaaatgatagatttaaaacaaacagtttggcaaaactttcaaaatttttctttgcttacaaatgcaacattttgcagataatatcttatagaagaactttggaaactaaaggaatacagaaatatacactgtgcaacagaaattttctctactttctctgtcaaaaatcaaccaatgtttatgtctagcattgtttactcaatagtgtaaagcaaacgttttccaatgacattaaaatatttgaaatataatactccatccacattcatataccataatgtacttaaaccatcatctatgacatgaggttgtttccaaaagttactgttagaaagaccctataaacaaggataaatattatatctagccttcagcatcaaattaaatctaaatgttaaaatgctagctgagagaaatctgttttcataacatttaaagagaaaattacttgattactgtatgtttggtgtatgtaattattttgcatactggtatttttcacgtggcattcatcttcacaattatttgtgtgattatcatcgtccctattttgccgtaaggttcctaaatatggagtttctattttactcatttctgaatgtcctatagtgaatatatattcaataaacattagaattttatagaaaccttgtggttcagctgctgaataacttacacagttttagaattctttgattgactatggtgtccaaagccaagaaacattggttttggatgacgaatcaagttatatctacttctagcaaataactggcattatagagtttgaaaatgatatttatcagggtcatgattattagatttcaaatcttagaatatcaggtagaaatgatattcaatttactctgctttcattcagaactcaaaacaagttttaacaagaggaagtcttaatcaggcaggattcctctggttgttaagaacatctttcccaatggggaaagtttgcttgcatgctaagaaaggagctttctgtttcagggagtagtgagctctgtaataatcaggaggtcatgttaaatggccttcgtagtccctctcctgtctatatttcctaatgattctaacacataattaagtgtcaataatagttatagtcaataactataagccataaggaaatttagtacatgactgattgttttttattctgattgtatgaagtaggttttgagagtgattattaatttgttatatgtaatgagttctaccctatatttacagggtgaatgcacagttttcttatttctccatcccgaaggaaatgaagtagtatttttcaattacagtgtagtagtgattattatatagaacaattacagactcatgtcttactactcttttattaaaaatgattcatttttctttcttaaaaggttgagtatatttttaaatgccgcttcacagtatatcatgttgtcatttccctttaccctccatgggcacatgtatccaattttataagtagataccacgaaaatattaatattacagaaattaatttaagagtcaaatttttagtagcacaaatgttctatgagattggatataactgcatgaattagcttggtattttcagaatctctgcattctggtctgtatgtttaaaattaggtattttcttaatctgcaaaatattatcttctagcctccactgtatgcaaagaaagtgtgctcatggttaaaaaaatattcaaataaaaaaataaattatcttgggatcctactaaaaactgcattttctttgcaaagcaagttttctcatggttaaaaaatattcaaattacaaagtaaatgctcttggaatcctactaaaaactacattttctttttgactagaaataaaactaattttatcacgtaatggtcattttgtgttgggtgcaatgtttgagtttatattttaagctttttttagagctatgttgctttctgctttcatcttgacataacttgtcaacagacttataattaaagttgtttgaggttcagtgattcattctaaataatgaatctatggagatcctagagaagataaaacctgtgcttggcaaatgtagaaactgtaattcttagtatccttttagcctaccaaaatggaaatccttcagtccctcacataggtaaagatatgtctttaacaaaaggtagcctttttaagctatgtatgtcaaagcaatttttacttaagacatcatggaaaagattttattccttcactgttcattgccaatttggaagctgaaataagaagatcctgaggcttttcccatttcctcacatgaaaggaatcagtcctcgtgtatgaggcagggagattactacaaacccttcccttacctcttggcaaattcaggaaaattgctaaaatgaatcttgacccagccagatccctgctcctttgcttgtaaccagaggcagtttcaatgcaggcctcttgtgacttccttggaaacagaccttgcatataagttggattgccagaaggataatgattaccatcccaagaggtaacgttacaatcgtcatgagaggagctctgtgagacggagaatatgataaggaatgattgtctcaccattatatgacttgtctatctcgtaatgcccatgtattgaggtgatggcctctcatgtcttggctcacaaaatgtattattccaaagatggatgaactgttgcccccggcccgctgccaaaagtatgaacaggaggtaattgagattctaaaccaagaagtgtctccagtgatgaatatgggaactcaaatatttgaacataatcactaatttaaatcaaacaagagtagtgtgttttttagcatttgaataacattcaacataaagatatatatggactaatacatactttatgttaaccttttattgtaattttaaaagctgtttcacttatttgattaaagagtcgttcattaccaagttgaaataattttatttaaaaatgtataacataaaataatcaatgtgtatgataaccaaaaatgcattctacaaactattaataagcatttaaaatgttctaggcaatggaattggtactgatgtacgttagtaacattcatattaatgtaaacattttaaacagcatgtagaattaactatcagaatgaattatactctacatttttctcctctgcccccaccccttatttcctacagtttgaccaatatattgaaggggcgctaaattgactttcgatgttgagattactttcccttgctatttcagtgaaccaaacttaagtcagataaaacaattttatttggcttcaatatggtgctattttgatctgaaggtcaatctaccaacaagcaagaacagtttctcattattttcctttgccactccaagcagtctttactgaagtctttctagcaatgtctgacctctgtttcaatacttctcacagatttcacaggctgtcaccaccactcagccatcactaacacagacaactgtaatggaaacagtaactacggtgaccacaagggaacagatcctggtaaagcatgctcaagaggaacttccaccaccacctccccaaaagaagaggcagattactgtggattctgaaattaggaaaaggtgagagcatcttaagcttttatctgcaaatgaagtggagaaaactcatttacagcagttttgttggtggtgttttcacttcagcaatatttccagaatcctcgggtacctgtaatgtcagttaatgtagtgagaaaaattatgaagtacattttaaaactttcacaagaaatcactatcgcaacagaaagtaaatgcttaatggaaatggtgttttctggggtgaaagaagaaactatagaaactataggtgataaactactgtggtagcattttaatcctaaaagtttctttctttcttttttttttttcttccttataaagggcctgcttgttgagtccctagttttgcattaaatgtcttttttttccagtaacggaaagtgcattttcatgaagaagtacacctataatagatgggatccatcctggtagtttacgagaacatgatgtctcagtctgcgcatcctaaatcaggagtaattacagaacacatttcctgttctttgatatttataaagtcttatcttgaaggtgttagaatttttaactgatctttttgtgactattcagaattatgcattttagataagttaggtattatgtaaatcagtggatatattaaaatgatggcaataaaattttatgagtgcaaagctggcataaaaattattttaaaaggtacaatttccctttcattccagttattgtaattctaagattaagaaagaacgttaaaatctgccgtatgtttttaagcagcatatgtttagaaactcatggaacacttgacattagaatttgtgtataccagggtagagaagtttgaaaagaacacacatctaaaaataccatgtcagatgttctaagaaaaaaaataaatctagagaagttattcaaatatattatttgggatgtttagtacttctctattaactaatgacttatgacctactttgataattccaaagtaaatcactgggccttttctccctggttgtgtcagcttggctaagcaaatccactagtccaggggtcaccaaactaagacctgctaaccaaatttagcatgctgccagtttggtatggctcatcagccaagaagtgtttttacgttttcaaatggttgaaaataatcaaaagaaaaataatattttatgacatgtcaaaattacataaaattcaaatttcagtgttataaataatgttttagtggaacacagccaaactcatttatttatcacttatgattactttcgcattacaacggcagagtttgaatagttgtaacacaaactgtatagtccacaaagcctaaaatatttattacctatcctatcacagaaaaagtttggcgacccttgctccagtcaaatggctctcaaactctatgaatattagcattctttttgtggcaacaactttcaggaacttccaagcactctactcacgatggtaatagaaaatctaacaaaaattgatggagtgaaaagcataatggcacaaatccgtgaagcttttgatgaatttcttttattattcctagtaagatgtacattaacttgtttgttgtcacattaaacatgtgtttatagacaacgcttagtggacatacagatttatggatactttgcaacattccaacaaccctccaacagttctccaaacagagtaatagggacacctagttgcctaacacttttaatgtcttcaggacttgcctaatacagaaattaacagagcaagctgattcatgtcaatctctgtcttcaaaagcttattattggctcctgtttggagaatggattgtgttggaaaaaaaaaaaaagtgtgttctgacttctttttgttttcaggaaagagtggctagtggtgaaataccttctctccaaaatttgtttgtatcataagttttcggcaatttttgtatgtgcctaaatgagaagtcccattgggcacatacagaaagattcttcaaataaaagctaacataaattgaggatttattatgtgctcagtagtagattcagtgctttattggcatcgcatgtatttttcccagtaacctcccaaaataggtatggctataattactttataaaattatacacagctacagtgtacctcagacaggatttgaactgaggtagctacaaaacctgggctgtatagtaaaatgtctttttcatagatatatgactaaggtaatcctattgatttacctgaagccatcccagttacacctgttgtcccagcataattatatatagcatcaactttcactctcaagtgtgtcctgatttggacggcaaaattatctgaacacgctatatacgacacttgattgataaatttagactgaacgaagatagcaaaaaggcaaacatttaggaacaaattcattaattgataattgtctacagggtggaatcttgttaaagtattgtaatgattaaagaggcatcatgcaaatataaccataagctttatattagctagtgccccgtttttgtatcatctgaagcccactaatatttcactgaatattgaggtcttgaccatctgttgaatagtgttttatttaaatgatgtcctcttccagcttctgtgacacactaccagttgtcacccacgactctttacctgacttgttttattccttctgccttattcctatgggagtatcacacagatccatctctttgcctttctgacttcttttattttgagacagtgtcttgctctgtcacccaggctggagtgcagtggcgggatctcagcttactgcaacctccgcctcctggtttcaagcaattctctgcctcaacctcccgagtagctggaattacaggcaccctccaccacatccggctaattttttttgtattttttagtagagacagggtttcaccatcttggccaggctggtcttgagctcctgacctcgtgatccacccacttcagcctcccaaagtgctgggattacaggcatgagccaccatgcccggccttttgacttctttatctggattatctcctctcattgattcgagcctggctctaagtgactgactcccaaatcatgtagctccagatgtgacactctccctcaaattaaagctttatatctctaaagctatttccgcttgtgcatccagcaactgcctcaatgttcatcaaatgcaaacatttgttccttccaattaaccatacctacttatacattgcacacatattttagttataattcattgcctgtgtgtctagagaagtagcaaatatggaaaaaatcattgcttttggaatcagaattactgaggtttgaatgctgccctttttttttttcccaacttttagtttaggttcaaggggttaacgtgtaggtttgttacatgggtaaattgcgtgttgtggctgtttggtgtacagataattttgtctctcaggtaatcagcataatatctgataggtagttttcccatcctcacctgcctcccaccttccactctcaaataggccccagtgtctattattcccttctttgtgtccatgtgtactcagtgtttatctctcacttataggtaagaacctgtggtatttgtgaaacctgcctgttttaattactagcttatgagcgcaggcaaattacttgttatctgtgcctcagattccagtattctcactttataaaacaactgtcatgaggattaaataagcatttaatacattgcctttaaggtggtaaacattcaataaatgcagtggttcgattcttatttggtggtggagaccatagagatgatgaagatggaggaagattgtggtgggtaggaggagtagaagtgatggtgggagaggtaacgatagtagagatgatgatgatggtggtggaggtagtgatggagatggtagtcatctattatcgacagggaaaaattccataataaacattatctcaaacctaagaaatgtaaaattaccttcctgttttcctcttcaaaacagaatttaccacctgacatctctagttctgtgaatttttcttctactttcttttccttatttattataattagattgtattattgggcaagtgccatcatttccgtcatttcatgttcattcgaattgccaagtccataacctgagccatatacctcactgtggagagaactgccctcctttctaattgatttactaaaatgaatatatctaaaatgatgctttttgatgtctctccagacatgcgaattcccataaatccagatacctccaaaataaaacccaagtgcttcctatggcattcagtattattctcattctccactaattttatgtctaccttcccaataatcattattccacttcagccagtaaattacattacattcgttttgttgtatgccttcatgccactcacataaaatttctcattgcccgtcaaaacaaaggaagcctattattacacttctttatgttttacttagattccattgtagcaaataccgtggatacaataagtaaccaataaatgtttgttgagagagtgaatggtatataattcaaataattgcagtaactaaaatttgacatttcaatatcatttaaaaattctacctagctcttcctggaattgttcttaataataaacgtgaccatcctgatgatctttaataattccaattttacccattagggtatccttatttacccaaaacaattaagggatttaaaattcagctttctaccacatagtttcttaactatctaaggtacatttagtcgattcctaaataattatacagtttctacatatgttgtatttattgcataaatttttctctttacactgagatttgcaaaagtgtctgatgatcttgggtcacaagataattatttctaatagcaaattattcctgcaattcagtgatattattgtacacgtaggtaattatcagagtaaggaactcagcctagggtaaaactagatctattatctagttaattggtatttatccaggagattacttcctaatcatgtagcagttattttaagggatttttaaaaaaagctttaatttatacttttgtagcaaccaggcagaatgaatggcaaattgtttttaagtgaatgccatcttaataaagataatttcccccaagtaaagcgttcataaatgaatatctttgtcctcaaggataatgtagaggcattttgaaatgcctcagttcacctggtctgttttttccctccagggtaagcagacagaatgtaagcttgctttctcggctatttcctgcatcctaactacataggaggataaattgactgatctacatacctgaattattattatatattctacttttcagtttgtttctgttttttgtttgtttgattttctttttatggctgctgtccagatgaagttaaattgtgtcacatctctggaaagaaaatagataacagataagaccgctctgcagttttgtgagactcatgcctaaaacatttttgttttagatattgattataacttcagtttctaaactaaaatctgaaagttgtatggcaaaatataccaagttatttgaaggacctaattagataattaatgtgtccgtgaactttttttttttaatgttctatatgataaattgatcctaaaatatctgggatgttaaactcagtaatgacacttttgcctattggcacagcccatagaaacaaaacattttagatgatttgcttctttttttcctaaggagactagacttatgcatgtttacaggttaattgaggtccagaaaggttaaataacttgctttcagttgcaaaataaggactggtgctgactctcctaaatccattctagtgttatagttgcaatgtcatgttactttttatgtattaaaggaaaatgaccttggtcataaattcaaatttcgctttagacactattttttgttaaaaaaaaaaaaaaaagaaatagaaatcttgcataccatcttcacatcctcaaaaagataaccatctattaaatgttcttgagattatgttgtcttatgcatcaagaataaatcaatagcagtgttttgaagaatatagtaatgtgaattctagagaatgctatgggatcagagaatacttagaacagtaatattcaaactgcagtgcatgaaacagtatcatcacctgggaccttctttgaaatgcagatttggagggcccttcccaaacctgctgaatcagaaacactgctggtgggcccaaaaatattttacaagcactctcggtgatacttatacaccataaaatttgagaaccctcgcactggcatgacaacagtggttctcatgcttcagcatgcgtcggagtcaccagagtttctaattctaataggcgtggagtggtgcccaagaattttaatttctaacaaggtcccacgtgattctgctgctactgatttagggcccacactttggaaatcagttcactggagtgtcttgtcatttacagtctgacccctgattctctttccttatgacagcccccataaaggggctttcacgtatgtccgtgtgaagagaccaccaaacaggctttgtgtgagcaacaaggctgtctatttcacctgggtgcaggcaggctgagtctgaaaagagagtcacggaagggagataggggtggggccgttttataggatttgggtgggtagtggaaaattacagtcaaaggggatttttctcttgtgggcaggggcgggggtcacaaggtgctcagtgggggaggttttgagccaggagaaggaatttcacaaggttaatcgctcggttaaggtggggcaaaaacaaatcacaatggtggaatgtcatcagttaaggcagcaaccgggcattttcacttcttttgtgattcttcagttgcttcaggccatctggacgtaaaggtgcaggtcataggggaaaggatggcttagcttgggctcagaggcctgacaggggccatctattcctgggcaggttaagggatgctactgttgcatcttgtgacaccttactgctttatgatgaaatgatctatccatatgcttgtttcatccactagaattaaagcttccctgggccaggatccatttcttgttcgttacctgtgtgatgtcttctgtgtagtagatgctcaattcaagctgtgaatagaaatgcactatattgagaactggtcctatgagatactatatctttggatgtctggctacagtagctatgtgaaaatgtattcttccagaatgcaaggcgtaaaagaatatcaacacgaaagaagacaggatcacattcccagagctgttacatataattttgttcgttttttgagtgaagaaaatggtactcatacttattcatctaaaaggagaagcatagttgagtgcaaataaaagtcagtttttaatcagaagacctgaactatctgtattcccttacggactcctgattctttcctttaccctctcatactctacatcgagcactgaaactgctctcagcaaggtcgccagagagctccttaattgccagctccaaaggtcactcttcagttcttttccctttttgacctttgtcttgtgcttgacagaaatgattagtcccttcttgaaatttttctctcctgcagtttctgggacattgttctctcctgttttctttcagagtatatcttccctgtcttctattcctgccctttaatgtcagtctacataagactcaaattgtgattttattttcttcttatgatgctttattttttggggaaatatcatttataatctttatcatcacctatatttttgattcacaaattgatatttctacctctccctctctcctgatgttcatccctgtataattcaaatgcttataggctatgtattcctggatttctgactggaatctaaaatatagttttggagtttagatcgtataactctagagagggtcattcacatcatagtctctaagaatggtacatcctgaacttgtgcagtgagcaacctgtgcagccattcacagtggtcttgatatctgccacatcactaaatccctccaaatgtacctgttaaattctctttagtttgttatttttttctacatccttgctgccttcactctagttaaaactgaaatttttctgtatgaaatttttaactgatttctctgcctctgatctcacctctcttatccatgctttttacagcctcccgagggatatcttaaaatgcagttttaattagattattcccctgcccataaatcttgaaatgcatggcgtagaaattcttttgtgatctttagctgcctacctctccagcttcactcccttctcctctgctccttttttaaaaaaaataccagtgctactccaaataatctgcaaactttttagtaccagtccacaattgagataagaagcttgagccagaatataaatcaatgtactccttcctttgtcaagaaagttcggcaattaaaagcaaaataagatcaaatcgtttgttcagtgactcagttgatttatactctggtgaaaactcttttcttcttacagactaatagcaaacagttcactgtctgctaaagtctgaactttgttccgcactgccctatgctttagcttaaattaaccactctttgatctccaaatgctctgtgctttcttaagcttctgtttctttgtacctactgttttctctgcctaagattctctttagatacctttctttttcccattcccatgttacctgccaccgtgctactaaccaccttgtctttctggttatctaaccttgcagaggcagttctcagccatttgtgtgttttttttttttttttttttttttggagacggagtctcactctgttgccagtctggagtgcagtggcgcgatctcagcttactgcatcctctgccccgtgggttcaagcgattgtcctgcctcagcctcccaagtagctggcactacaggcaagggccaccatgcccagctaatttttgtatttttagtagagatggggtttcaccgtgttggctaggatgggcttgatctgttgacctcatgatccgactgctaaggcctcccaaagtactgggattagaggcatgagccacagtgccaggccacttctcagcctttttaacacttctattaaaacacttgccaaattgtatggtaatgactttatttttgcatgcctgtatctccagtaaacgccttgagggaagaaatcatttcttgtcatctgtacacctataatgcataaagcagaagtcagctcatagtaggtattgaataaatatttattggatgttgatgagggattttccaggttttgtgcgagtcttgtcagaaaaacaaaatcactgtgatttaaagagaggaaacgtaatataaggaattggctaagcaggtagtagaaaactgagacgcagcgcaggggatggagaggcaactcaaagcactagtaacgtaaggaagctgctaatatccctagagctggagaaacaatacagaaaaagtgatattaccagagctcagaagctggggctttctaacagagattaaactaaagttaggactgccaggcagaaaattggattgttgaagagggagctagctatccagagaaaacagaagccacagcagagatacatctgctctagaaatgccacccaaggtagttggagaagaaaaaagaccttggcttttctcttcctcccaccttccaatattctgccattgcctccaaatgaacaattaggagggcaagtggtgttgggaaatgtatatccctctaatacagaaagtacagaagaaatgtggggaatagatctgagagcagatgggcatattactgcacagatgggttctggccgtgcatcttctgctcataaactatgtgacttaagccacttaatctccccaagaatctatttcgtcacccctgaaatggaatgtatatggccttccctgtttgccctcacactgtggaaattatattacatgtgtttgtcttgaagaacgtttacatttaaaaaacaatgtctcctttccccaggagaaagttgagtttccaattattaattcagggatggtatcttcccatgaccacatttatatattattcttattctgacatcttctgagagtattcttagtaaagtcttccctggtcagaaacctgtctctttacaaatgaacacatattatgctaccacagagatataaaaatgatgccaggctgggatggcctgaattgtgtcctccctaaattcttatattgaagctctaatctccaatgtgatggaatttggaaatggagactttggaagataatttgatttagatgaggtcatgaagatagggctcttctgaggagattagggcccttataagaagacacaacaaagagcttgctggctctttctccctgccttgggaggacacagcaagaaggaggttgtcttaggctgttcttgcactgttataaagaaatacctgcaactgagtgacttacatgaaaattgatttaactggctcacggttctgcaagctgtagaggaagcatggtggcgtctgcttctggggaggtctcaggaagctttcaatcatgatggaaggcaaaggggaaacagtcacatcacatggaagaatgggacaaggagagtgagacagtgcagggggaggtggcacacatttgtaagtgagttctctcaggagaactcactatcgcaaagacagcactaagccgtgagggatccgctcccatgatccaaacacctgccaccaggccccatttccagcactggagtttacaattcagcataagatttgggaagggacgaatatccaaactataccagaggctgtctacaagccaggaagaaggctgtcaccaggaactgatcctgctggtaccttaattttggaattgtagcctatagaactgcgagaaataagtggctgttggttaagccacccagtctatggtattttgttatgtaagtgctagctgactaaaaaccggctttgttaagcaatgagtattacttctgttttgactaaagttcatagtgatgcttactaacacagtagatggattgaaacaggtcatgatgctggcagtggggcattaagtacacgtcagattgaaatggctttccacattgcactagatccttttggaacccgggttggaagttatttaaacttgaaagacccacaagcatgttgacttctcttaaactcaaggacctttcacactgagagagtttaaagtttaaattgcctcccacagggtccaagtcatcatccaatgcatggtgggtttctttgaacacttctgtagtcattatgagtccacatcatttcaagaaagaagagacagcaacattagttttcatgctaattttcctattcactcaactaatatctaatggattgctatggtatgtaaaacactccagttactttaactgtaaatctaagctttccctcaggaagcttgcacccagcataaactgtcatgaagaagtactaataaaatgttagaaaagttttaaggaagaaaagttcacttcctgcttgagaggcatggaagacttatgggaaaattagcatctgactggataattaaagagtagggaagcattgggctcaagatgaggaaagtgacaattcattgcaggggaaagcctgtatgcgaacaaaacttacatgggattaagtattcttgtttgcctccagcagaagtatgaagtaaaggaagtttagaagtaaggaatgaggttgaaaaggtaggttgagttcataataactaaaggtattcaataaaagattaaggcatgtagacttaaaccttctggtcatggggagccattgcatatttttgagagagagaaatatgatatggctactgtgaaccatatcattttgatctcacttgagagttgggagagagaggccatcttaccttggtttcatagactgggaagggggaaagaaaagttttctctaaagggccagagagtaaatattttaggttttgtgtatcataaaatttattttaaaactactcaactctgctgctatagctagaaagcagccataaacaatgtataaatgaatgagcatgactgagttccagtaaaattttatttaccaaattagatggcagaccatatttgtcccatagaacatactttggggattccggcactaatgggtaaaatgagactattttgctgttgatttttgtttatatgtttcattgtctttgttatagctgtgtttgcagtttttattcttgttattccaattgtggcttttactttatcagtcattaagaagacactaaaacaaatatgactactctcacacgtgagaaagtgagaaatggcatagggcttaaagccagttaaaaaaggatcatggaagatattaataacaatagctaatatgtatatggcttctaccaagtatttgctacatattaatgtatttcacacttaaaatagcattacgaagtaagttttattattgtcactctttgccaatgataacaatgtgtcatagaaatttcaagtgacttgctcatggtcacatagtttacaggaagcatcgcagctaggatttgaacccagacagcctagcttagggtgttgccttcggaaattcctcgccttgctatgttgtaataagttaaaggtgatttcatcaaattatttagctgaaataaaatgcttgactgggactccttaagaatttgccaaagtctatggaagctgcacttattctagattatgtctgttctacattctgaagtatcattgactctagtgtcccatggcaacacttgattatctttaaatacagagacctttttcactgaaaagatttctttaaaatttagatgtctttttcagcatcaaaaataagtggaatttccatataattgaacttttttttccaagtgcaagacttttggagctcaccatggtcttaaccacattatataataagtagtaacttttttcatctatgcttaatattttctctgatgtgagaaattgtatcatcagattagaaagttgaggattttaggaaattaagggaaattccaaggtaataataaattgggaaataaattattttatattgccattagggtacaaagtatacaactaaggatcatattttaatgaaaaatttcagaattaatatcctgatattagagacttcaatcaaattctcatataatccaagatagcgtagtcaaaaccactaaattactgtactgtgtagcaatgaacagtaattctatattgacttatccttattttttttttaagatgggtttctcgtttatttggaacaaaagaaaaatgtagtgttgtagaaatctttggattcagacagacctgttcttgagtcttgactcagtgcttcactgtgtattgaaactaaatgaagatcttcaacttttctattcatgatcaatctgcaaaaataaaagctattacagataacatacaaggtttcttgagcgattaagttttctttttgaaagcctgtgacctgattaagatgcttaaaatgatatatatgtctcttttctgttctttaaatttgaatgaaagtttggcattttaaaaaactttaggtgatttaggagtataattttaagcagatttttagagtacgagtgtccacatatttaactaaacattcaaaaattagttaaaatcaatgaacttgggaaggaaaactacttgctacataatccagaaaattttactaaattatttgaactaagcatgactctccaaactgtggacatattttctcaagggattctatgtattatggcttcaaggtacttttgtgtgtacctcaaaatggctgaaggcattttaacagtgcatctgagagtgtcttacttacatattatttgtacactattttatctatatctttggacattttatatttctgtgtaagtaaaacttccatgaaaatttcatttgtcaccatattttcgttatgcagataagaaaacgaaagaagccaaattgaagacaagctctgaaagggaatgtgcgccctctagtgacccacatttatttatcataaggacataggcagcttttgggtttcatcattttaaataaactttacatttgattttaaaatatatgactcaggattttcaacttgagtatattatattgtatgatcatagatttattactctgacaggatttcatctatcatttaagagaatatttctattaacctgtgttaaggtgattttcttgcacagaagtgtgtttcaaagggactttcaatttattgaaaatgaaaaataggctttaggcatctgtggcttagcagcattttatttcccatcctctgggtcatgcagtttttgcccacgtgttttcacactccttggctttataactaattcctctaatgtagcagtatctgacattttagaatttgtgggggtttcttaccttttaatttttaaggttgtttctctcaaagatatttaaacaaaacttataaatgtgacatctgttcaatcatgtcacactttagaaataaatattaccaatgaattttgaaatgattaagatttaataccaaattaaggtaggaagattattttaacatcatttctacctaccagacgtcaaaatattttaggtaagttttactttgtgcagagaagcaatattttacagcagttttattctcttcactgcaatcaacgattctatgggtgccaagatgaatatcaataccaaataactcagacatttttggcattaatagcttaaaacattaaatcattcaatttgtatgcaagggcatgtattttaaaaagcagaatttttaaacatactaagtatataattcggtatgccataattgataataaagaagatgtacaattttaaggacaatattttgtgcttggactagaattcagcttttgaggcacatgttaaataggcatattttaggacaaggtaaacgccacagaaattgattttttagtatcttttaaagatgcctttcagtgcaatctgaaatcattaaattttactgtactgaaacatattattttatgagtgatgtgcttaaaattacacatataaaactagaaatacatttgagaccatgcaaatataaggaaaaatagatttttgataggaatgttaatatagcagtttccactaactgaagacagagtcctctgtcatctgtcacattgttccaggtgctgtgtaaaccactgaagagtttataggctttttattataactgggaattataacatctttagattttatttaatttgattgctagatgaatagactaatgtaattggaatatgaaagccacaatataagcaaagctgatctcagtttttgtatcttgggtcaaaacctctttaattagagaggtaagtaaacatatttacaagtaatttttaaaaagcatttgtattgtagacccagaaaatctgagacaggtctcagttaatttagaaagttgattttgcctaatcctaggtactcgggaggctgaggcacgagaattgcttgtccccaggaggcgggggttgcagtgagattgtgccactgcactccagcctgggtgatagaatgagactttgtctcaaaaaaaaaaaaaaaaaaaaaaaaaaaaaaaaaaaaagttgatttttgccaaggtggaattcgcgcgcctgtgacacagcctcaggaagtcctgacgacatgtgcccaaggtggttggggtgcagcttggttttacacattttagggaggcatgagacatcaatcaagtacatttaagaaatacattggtttgacctggcgcggtggctcacacctgtaatcccagcactttgggaggctgagtcgggcggatcacaaggtcaggagatcgagaccatcctggctgaaacagtgaaaccccgtctctatgaaaaatagggaaaaaaaattagccagacgtggcggcaggcgcctgtagtcccagctactcgggaggctgaggcaggagaatggtgtgaacctgggaggcggaggttgcagtgagccaagattgtgtcactgcactccagcttgggcaacagagcgagactccgtctgaaaaaaataaaattaaaaaaaaaaaaaaaaaaaagaaatacattggtttggtccagaaaggcaggacaactgggtgggggtgggggcttccaggctgtaggtaaatttaaacattttctggttgacaattggttgagtttgtctaaagacctgggatcaatagaaaggaatgtttgggttgagataagacattgtggataccaaagttttatcatgtagatgaagcttttagctagcaggcttcagagagaagaggctgtagagtgcttcttatcagacttaaagtctgtgttgatgtaagtgtcagagaggtataatgaggcatgtctgacccccacttcccttcttggcctgaaccagtctttcaggttaaattttaagagccctggctgaggaggaagtccctttggagggggagttagccttttatttttggtttacagtatgtttttacttcaggaccagtttgataacagcttttaaatttttacaatttaaagcaagaagtcgctgaagatcgaagaaattaatttacccaagaaaataccagaaagataaaaattagggattaaaacctgtggtgcctgatttacacacacatatatagctatgttatttttttttcttttttgagactgagtctcgttctgttgcccaggctggaatgtagtggcacaatcttggctcactgcaacttctgcctccctggttcaagcaattctcctgcctcagcctcccgagtagctgggattacaggtgcccaccaccacagctggctaatttttgtatttttagtagagacggggtttcgtcatggtggccaggttggtcctgaactcctgacctcaagtgaactgcccgcctcggcctctcaaagtgctggaattacaggcatgagccgccacgcctggccctcagctcagtatatttttaaatgcacatttactttacatttaaagcaacttaaacatacacacaaacacacacgtatcacacatattacaaaatacaagacaatcatgtggccctatcttccccccttccacagagggagacacacttacactatacaaacgtgtatgtgttgtgtgtgtgtatacaaactatcttgatttggagagggaactatttatctaaatattagcttgttttcttttggttaaataggatttcccctttaataatattctgtaattccaaaaatataataattgccatgtagtcaatgcatctcaaagtcctaaaaatatttttagaactaataggatttatactgaatttcatttgatatttttataagatctatttgatgcaaattgaatttgtattctattactcgatttttttttaaagcaaatgccatgtggaaacaagcagagagggacaagttttcccagaaggaaagttgaaaggggaagagtagagagaggttgatcaagaaaaccttcacagatgatgtgcatcttgaactgagccttggaagatgaatagtaggtcatcttcaaatggttggggatttagggtcaggaaagtgcctgtatagtaatatggaattaaaatgtcttctcacttcggaaaactctgaagaagaaaggtgatttttaaaaatacagcaaagttggaaaatcttacctccaaaattatttcttctttaataccaacaaagaataattatagttttgttcctattaatgttaaaacttgcttcctagctaattaaaatgttcattaagaattggtttcataaattatctggtctaggcctagagccctgggaccctgcaatggttaacgtatttcacaggcatcagcattttcctttcaggtttctaaggatgaggcttataagtttttatgaaattctacatgctaagatgtttaaatatgtaaaatggccattcataaacctagttcactaatcaaattagttaagtctgggagcttggaggacttccactctcaaagtttacacatttgggaatgatgagttgcaacttgtatattgaaagtgactgaattaaaatttatgtaaatgtgtcatcttagtttaataggttatgtggcagtcactgtaaagaaaattaacagaacacagtgcccatcaggaggctcttctgacataattagcacagttatatagcactaattcatgtaatgttttactattgacaattcaaaattgacaacttcttaaatggcaaacatttctctagttctttgagatgtttgtatgtgtttttgcctttgaatttattttaaacatttatatacacaggtatctctcagtatttaccatatgggatgtaattaacctaatttacatcatttttatgggaaattcaactggatgaggctgagtctgtttgtacaatataatactgagaaaaattgtcactctctgaatatttggtatatatgccccaggcttttgatattttgaaacttccaaaaaatggaaggtctttttgaaaaattgtcttggtgtagtaatacacttttgccaagaaaaaaaaaaatcaaagacttacttgccctgtatgatgggactttacaagttttaatttcaggggtttctgatgagtatatttgtaaaggagaaaaaaattgtcgcttcactgctaaccataaataataacaaattgaggttttaagatatacttgaagaatagaggacagaatattcatcaataattatagaaataatcattttgtgaacagagaatgagaagttatttttttattagctaaaggagattttaagctaggtaaagttagactgcatttaagggatagagtctgataacattcggaagtacgttaagtacagagttaagtatatgaggaaagtaagttaagcactaaggaatatattagtggactgattccaaaggtgtagggacacattatgagcaacttatgatacataagttcattagcaatggttttatgtgagttgttaaagtggggaaaaaagaattattagaaacgagtaattttatgaagaagcaaaaatacatgtacagaatccaacgttgaatatggcattgaaaataagtcttcagtgttttccttgagggttttaaagaaggtaactgagttgcatctgaatgatatatttcgttcgtaattaaatacccaggctcacttagtgcaaagtatgatagaaaatgccatctgcaaagcactgggaagagtagatagcacccaatttaaagcatgaagacatttaaatcagaggtgtctgttcatttgccatgcatctcagcaaagatatctgaggaatatctagtagcagtgaaatacatgaaaactacacgacaaaccacaaaaagtgatgaagcgatagttgctaaattgataaggaataaaataaacgtgcaattgcttcttggaagccagggtctgagtaggatccgggaaggagactgagttcattgtgcattgaaaatgtcactgaacctaaaactaagcgttggatgtaggccattggcactcagggagagtacatgggaggccttgaaaccctgcctctgcttcctcttcacccttccatcctcattgctggcataaagagatgaggctatccactggcagaatattggagagaaaacaatgctagtagctgacagttaactcccagaactctaagagatggtggtacatgttaagtattagagtgtaggctgactgcacattatgtgtggacaaaaagagttttagcaaggaaatcagagatgtttgaaggaagaagtccaaatggaagcaacataaaataaatattaagattaggttaggaatagctcagagcttgaattgtgtaagaattgggttcagtgtccacctgtttcccatgaaatcaagatatcacaataatgatagaaatgaaagggaagaactccaacaggtgagaagagtccaaactcattaatatgtttctttgttccattttagaaaagaagtataacattaacctctgtgcttatgaataggttattttccttagacaaaacgctctcctcaccactgccctagtaaaatttgaaattgcctttttaaaaatctgtacatcaaaaaacgagcgtaatcactctccatacgatctttgtataaaagggaagttcacgcactgtatgtgacccctttccaaatttataaagtcagacaaaaaattgaatgaggaaagacctttctgtagaatttcacatcctgttgtttgaattgatttgaattatcagaactacgtgccaactggtgtccaggcctcccttaaaatcttcacagacagagaagcaaacagacagttaccatggtgttgactccacaaagccttctttgtgtggagataaccaatatacttggcagagcctctaggctagaagctgatttaatcctaatttacagagaaggtgttttttgattatcctcttaaaaagaccagtgtgagctgagccccagttctgtgtctaaaccatttttatcttgtcaaacaaatgcttcactaaaccaaattacttgataatgtggactaatgcattctcgtctctgttctttatggagttaatagcatgtctggcacatagtaagcacttagtatatgctttatgaaggggaaaaaaaggagacatttgaccgttttaaaaggaaacatacaattttgcctttttcaggaaaatacacctctaaaagtgttacaagatttcttctggggccgggcgcggtggctcacgcctgtaatcccagcactttgggaggccgaggcgggcggatctagaggtcaggagatcgagaccatcctggctaacacggtgaaaccacatctctactaaaaatacaaaaaaaattagccgggcgtggtggcgggcgcctgtggtcccagctactcgggaggctgaggcaggagaatggcgtgaacctgggaggcggagcttgcagtgagccgagatcgcgccactgcactccaggctgggtgacagagcaagactccgtctcaaaaaaaaaaaaaaaaaagatttcttttggaatgaaaattatttactttcaaactaaaaacaaacaactttgtttcttttttctgcagtgaattggaggtggtggtataacagttacatcaacatgcatgttataggagcagaaaggctgtgatccctttccttcctccttatacaggtcatagcagacattcctataacaaaagataggttaacaagagaaaagcatgagatatttatctaataaaagttttaggtgacatgggagccttcaaaaatgaagacccaatgacccaaaggaaaactgtttttatgcttagagttgataaagagtagacagccatgtaggaatgtgattggacaaaaagggaatgatctgatagtaatagactagggacaaccagccaggcctgtctgtgtagaattccttcctcctacacatggggtaggaccccacttgaatgagggtcttatgatctactatcaaacaaaagtatgtcagagaattttttatggctagctaatagagagaaaggtgggcaaaatacagagttataattctggcttttatggttggctttggaggagagggtttttggtttctatgacctaccttgaagaagaagaattctggttactatgactcacttcagggaagaatgtggagttaaagacaggaggggaggagaaggtcagagggaccttggttttgaggctgcttttgaggccttccagtgttctttagttcaaagtttcagcatgccaaagtgccatactttggggtatcgttttctgagcccctacagtgtgcaaacaagagcaatgtcaattcaacgcctagtagaaatctttctccaacataggcttcagcagatttctttcagctgtcatgccagcctagtaccttgaggcacgtttgagtttcagggacctctaagtagaagtgagcaatctttcttagagatagtctaaatcaaatgagggtgagactagagagattaagtttaaagcgtgaatttgaaagtgactggtggatattcctatctcatatttatgagtcagagggtatttgatgtataattgagtcagacaaataaatttcaccaaagtggcccaaatgcattatattaacaacccagttttcaaaatatttatggaagagtcagtgaaggattttattccattggaggaggaacaagaataaagaatagctctgaattactttagaaaatatgaagcgaaatttgtttctacaagtacttgaataaaagacaaagtagaatatacagttaagaggtctatgaaggccagattataaaggatcatgttgaaattttgttctttattctaagaaaaatgagaaagtctttgagtggttttacgaatgaaggtaacataatcagatatgtttttactaccgtatatttcaaagtagctagaagagaataatttgaatgtatctagcatagacaaatatttaagattatggatatcccaagtacactgatgcgatctttacaaattatacggatatgttaaattatcacatgtacccccaatctaagtacatctattatgcgtcaattaaaaaagatagaaatgataatttttccagtagtacataaaagagagagttccataaatactgcccagaggccaagtgaaaagctattgcggtatttttggtcacatttaatggcaacacagatttgggttctggctatggagacaggaagaagcatacatattcaggagacagagaatgtatgtgtgacagattagactttgcaatacattaaacatgggaaggaagagagagggttttagttggtttgctgtaacaaaataccataaactgggtagcttataaaccacagaaatttatgtctcccatttctggagtttgggaagtttaatatcaagtaactagcagatttagtgtcttttaagggcaggcttcctggttcatacttggtgctctctcactgtgccctcacacggtggaaaagaacactgatctcttcagatcattttaaggggactcatttcatgagggctctaccctcttgacctaattacctcccaaatgccccatcttttaatatcatcacattgggaattaggcttcaacatacgaacttttgtggggcacaaaattcagtccatagcggagatgaagataacaaatatgagggatggtgatgctaattactgatctggggaatactgatagagtactagtttgagggagaagatcaaactttaaaccttggcatataatgtttaaggagattttgcagcatgcaagtggagacatccaataggcagatggttatatagctgtggaattcagaacaagtgcctgaattagagatatacatatcagaatcattgataaatagattgcaattcaaggcatgatgactgatgtgttttctggtgagagatagtagagtagaagatgattggtaatgaactaggtcttgacatctagtacataatgatagggtggaggaggatggacctgcaaagaaaaaattaccaatggtcatagaaatagaaggcaaattagaatagagtggcatcatgaagccaaaggaagaaaaattacaaacggatagtatggtcaacagtgttaactgtagtcctagctacttgggaggctgaggcaggggaattccttgaacccgggaggcagaggttgtggtgagaccagattgcaccactgcactccagcctggtgacagagtgagactccgtctcaaaataaacaaatactagaaattggatggactcagatgcttgagcaaaagtaagagaataaagttcaaaatgtaggtagtgggaatgactttaattaaaagaagggaaactcaaatgtaaaagaagggaatgagaacggtggctacatatgcgggtctgatggtgtttggaaataggaagtgaaagaagttctactctgataattgcacttgtttctgtaaggtagggaacaagatcatctgagagagctgcagaaagaggatgggccagagctttgataaaaggttttaatagttcctgtagagacttagagcccaacttgggaaaaaaaaaaaaaaaaaaaagtatggcaggatgctaggttcatttgaggctgttgattattgccttagtttgggttgccccaagagtagatctgaagagaaggatttaggtgcaagcagtttatttggaaagtgatcccaggaaacaaagtagggaagtgaaataagaaaaataaagcagccaataaagtatggcacaaatatagggatcaggttactgctggaaggaactggggctcaatcatgcagggaaccccttgagacactgtgtatcatacttcaggattgtccaactgaggggcaagggagctgggaaattcaccaattccaagctctcactggttaagggacacccctaaagtattaacattccagcactccttctctgtccaatatactggcaaatagatgcttgcagatagagagacacaggaaattttatgttgggccaaagcaaaaataaaaatgttttaagacattatgatgataaatatgcataaaagatgattgaaatataattcactggtttgggtaggtaatcaaataaccatagtaggagagtatttaaggagttaacatcgctgaagagagtgtgaaagatttttacagcatataattgtactgtatattttaatcaacattatgaatgaagaaacaggaacctgatagtcaaacttgtggataaaaaatgtaggaaagataaaaatcatatatgacacaataaaaatccataaacatttgtaatgcatacacagataacttactgacattcagtgacatgggatttagaggaatcaggatccctagtctcttaatttcaagttggatagcctcgataaataacaactcaatctgtatgctatgaaccgtcaagtttctgacccatggtattgaggtcaattaacttaatttctctgaagctccatctcatcctatgggcagctggaattggtgatacctaaccaaagaattttgtgagaatataaaatgcgaatatgtttttctaagggctttgtgttccattaatttctgtatctgtttaatttttaaacaatagcctgcaacaaatgtgagaaattctaactggtttatatgattcaaagtcccaaaactggagttcaatagatcaggtcatatgtttgtgatagtaattaggttgtgatataactggtttaatgatagtttatgtgaaaaaattcctagaagttttaagtcaattgaattgcaatgtgagttgaaagtctaatattgaagtgaaaatatttattgaaatcatgggctatatcaatgaaagtattataaaccagaaagataattattcttccctgtttattttacacactgctgatatgttccctttaagtacccaatttaaggaaactaagataacaacaagccatagaatatccgttgaagtaattaagcatagggtaggctgatgatcaggtatctactgataaatttaaagagcggatttcaaatatttataattttgtatccttttgccaatatctttccaactactctccacccccaccagctcctggaaatgaacattgtcttctgtttcttttagtttgatttttttttttttttttttttagattccacttgtaagtgagatcatgtggtatttgtctttctacacctggcttatttcacttaacataatttcctccgggttcatacatgttgttgcaaatgaaaggctattcatagtcttaaaggcttaatactattccattagacacttgggttgattccatattttggctcttctatacctaaatcaccagattagaatgaataatttatccctggtggctccaaagatctcttccaaaaaaaaaaaaaaaaaaaaaaaaaaaggtttgaaaataacaggataggtgatctgatatttatggcagcataacaactcacaccaaaatgtagtggcttaaaacagcacctatttattatttctcctaattcttcaacgtaggcagtgccctttgggtatttcttttctctatgtggcatcaactggagcactcatttgtctgtcttcagctggcattgagatgggtcacagagggctttatttgcatgcctggtgccccatgcttcttcatgtggcctcttcacatggacagatcaagtttccttaaaacatgatcacctcaaggtcattgtacttcttatataattgttgtcttctcagaatgtgtgctctaaaaagtcaagctctgacatgcaagcacttctcaaaaccttacttgcagtactcttactattgtcccatttgtgatagaaagtcacgtggccaaacccagaggcagtatgattggagactacagaaaagcatgtgtttcaatggtgaccaccaacaggaattttttttttctcataaatactttccaaaaagaaaaggttatcgtgggaagtagtactttttcaaatagtggaaacattcaagcagaggctgggtaatagcttacaggatatattgtagaagtgatttttacattgaggtgaataaaatgacctctgtgatcataagactctagatcaaagctgactccaaatttgagtctacctaacagggaaaatagtgctgctattaatactaatagaggtgtcaggcaggagtctcagattgagaaaagaatgataaatgtggataaattgctttttttaatatagaagaaagagataatcaagaaataatgacttttattttttgctgtcttaggttggatgttgatataactgaacttcacagctggattactcgctcagaagctgtgttgcagagtcctgaatttgcaatctttcggaaggaaggcaacttctcagacttaaaagaaaaagtcaatgtaggttatgcattaatttttatatctgtactcattttgtgctgcttgtaaactccgtgctttgttatctgtgattctactagttgatagattaatgcgatatgataaaatgctgtttaatatgtcttaaaaatatattttagatagcaagcaaaatcaaagtttagcctagagaaatctttctggattcttctgtgactgactagggatgcctttcataaacttgccttaacttacatattatttaactataaattaacaattttatgacattaattcatgttgattcctttcatatattgttcagttacctcaaggctaggccttagcaagcttgcacaattgtgtagagtagaatagagtaaaatagaatagaataatataatagataccatacttaggactatgtctatattctcactgttatcaaaaagttattctttatagtcatcaatccctgtcatatattataagatatttaaatttcccagatatttgtgtattaccttatctaaaaggtgtccagcctttctcagtatttacatgtggtagcagatgctttgttgttgttattcccttctgagatggtataattttgaccttcacaaataggaagttttattaatttaatataaagtgtttcatctttagggaaattgtcaaggctttaatttttcaacttcaacaattataaaacatgcatctttgtatatgattggcaacagtttgtaaaataatttctaacaggcagagtaaataaaatgggcaagctaaggaagcagtgattatgaatgaaaagtaattttatccatgggaagatcacatctaaatgtgtatattagctctgctttttctctccaggattcaaatcatgaagttcaaaatccattgtatttttacaaatacgacattacctcagttacaagctaatgtttgctgttggggttggaacttttggagatcaacaaaagatatatatatattctggaaaaaaaatctattttttaggctgcttgaaaaagggaagacaattttgtcaccagttcttcttagagttaactacttataaattggaaagctattttaaattacttattagctttataagacatgctgttgtcagcattataatagactattctaaattgtttcaagaaatgggaaatatgaaaactgaaagataatatataattgtagaaaattagctaaatgtcttttttcaagtatacttctttgaaggtaaattgtttgctgtgatttttgagggaaattctcttagtagtagaaaattaattagagaacattaaactctaattttcaaacatcatgttacatatttgaccactgaaagtatgaatcacctttagcattttattagctaattaaaaatgattattgatctgattctcacaggtttctgtctgatactctgtttctttatcttaagacagctttgatcaggcaggaaaattgagtttcagtatttcaggaatataaattttaaaagttcctgttatcatgtggttacctatgaacgatttgcattttatcaatagcgggagcatgacagactaaaagtgctcaaaaatgtacagtgttttataactggttttctgataccttgtgagtcccctttatcaacctgaactctcattttctgaaataacaacatcattcttaattgcctactaaaatgggacatgaaatgatttaccttgatgtttccctcaggctaaatacaatgtatatgtattaaaaatccttgagagaaatacataattacgatgatggatattcagtttaggtatccattaattttcttactacatcacctgtcggtttatataggttattttaaactcatggcaggctcgtgtcatgaacttgagtggtattaatccatttttaggctttcattaaaaatggctaaatattaccaactcttttttttttcacttgatttcttcatttactcctttcaaatgcttttagccagttagcatatcataggccattatcagttcaatttcacatattttaaaaaatgcaacttttaaacctaagcataattttttccttgtatattcaccatgtgttttattcatataattaacaaaatgcacttatttaaaagctgacttctgggggacctttctaatcaaaatgtccctggaccaccaatattgacattatctgggagcttgtcagaaatatagaatctcagaactagtaaatcaaaatttgcctttgaacattttccaggagtgattcctatgcacataaaggctcgagaatcaatattctaggacacaatcttgggctttacgtagcagttacctctcacattcttttagtatcactgcagttcagactttttagctgaattaacagattctaacaactcgaattttttccgtgagcacatggtaacgcaaattggtaatgaaacaaacaaaaaaaatagcctcctttgatcacaaggggatttgataaggtgtctgaaaatctggagcttctgtgaggttctcttgaaaccctccctatcaagtcgttatggtcatctggctttgggctcttcctcggatctgcacttgattaccctctttcagaatcaactttttaccaactcccgctggaaatcatcaagccagttaatgcttccaatttctcctatctctgttatctgtgtttactacccagagtataggtacctcgagtctatattttcttctatctttctctctctgctctattgcactttcttttccttgcttcacttcctctgctttcccacactctcactcggcaggctcaaacactttttcaagacaagccttctatatacttattctactcatacgtggaaaccaattttaccctcgaaaacagcactatgactcatccctcttttgtacccccactactttagaatgactgactccctcacctaacagagacaattccaaagatactgctctcttcatgtaaaaatacctctttccttgcagttaatgacttctggccatctcttatctaccattttatcatattttctcattgaagactttggcactaggttagtagattttttcaaccaatttgttctttcattcttagttatttcagcatccctgtgggctctcctgctatcactaaaagctgttgtttctctcatctcctcaattcagctacctgctgtcatgattgtatgtatgtagatgttgtcattgtcaggcattactccatttctttaataagattatttttttgagacggagtctcgctctgtcccaggcgggagtgcagtggcgcgatctcggctcactgcaagctctgcctcccgggttcacgccgttctcctgcctcagcctcctgagtagctgggactacaggcgcccgccaccacacccggctaagtttttgtatttttagtagagacggggtttcaccgtgttagccaggatggtctcgatctcctgacctcgtgatccgcccgcctcggcctcccaaagtgctgggattacaggcgtgagccaccgcgcccggcactaacaacatattttaacaaaaccagcagttcttcataagctttccgtgcatcctaagtatattttcaacttagtttctctcaacaattatttcaagcttttgtggggtacctaaactttccccatcattcacagtaaatgatttcatctcctactttagtcgaaataatatttctcaaattgtgggtatttgtgctcatagtatcttttttttttttttttttccacctgccttagtggaagaggctatccttcacctggttgaggctcatctctgggtgtgtgttctcagcagcatcactgactatgtattaagccacctggttccattcagctgtatatccagattgtcaaaaatctacatcccaggtctttatcattagcttttaaaccggttgtgttttcatcttttagaacgtgtcctctcctataaacatgcatgtgaatacttaacgtgccttatcttactcaatccctctgtagaactagaacctattaacctcttttccctcatgaaattctttcctcgcttggcttatgggatactgctttctcctgattaattctttcacattcttggccatttgttccaattcagtttttctttaatattgatattcttcagagtccttgtgtttcttctctggatatcctcattcattcccattcaaatagtgtctattttcaaatgaacccttctcccatatgtatctttagctcatctctttcttaaaacccagggtgatatatctgactgcctaatagacaattttaattgatgtttgcctgatatcttaaatctcattatttccccagacctcctttattctttctccttcctttcaccctgcaaacagcctaatccagaaacctgaaagtgaactgggtcacctagatttttcttctaccattcacaagtccaatctttgacaggttcaattaatcctgctcccttaacagctcttgaaaatgtccagttctctctattcccatcaccaaaaccctgattaaagctaatatcatggcttacttctatttaagatgacaatcctgtagctggtcttccctgctactaatgttatattcctttagaagtttccacatcacctctgccaaagcgaacatattaaaacctcagtatgatcttgttatgtctgtgtttataatcatttgagaaagataaaatcagctactgatagccaggagctggcttggcacttcagttaggctttggaactgctagatgttgccttggtacttgcagccagtctgatgttctctggttgaatataaataattgctagggatgccagcatcatacagggacacgctatggttgtgatgaatcaagataaaagcaagaccactttgtaatcatatcttaatacagtaaaaaagaatagcattgtccaaaccacgcctaatgaccaaatatccctcatcttcattaatgtgacacattatgcttctttactaaacacagctttagcctctctgcattcctcctgccatctagataaaaattttaggacactcaacatagaattaccctacttccttacaacatccaatcaaaacaaagccccacttccttgatgccccctatcatgtaacacaagcccacatcttaaaataagctttttctaacatactcttagagacagccccatagttccctgtgatgcgctgtctctctcgttgcagcgtgtaaatcaggttaactttgataacctacaaatatgttccagtggtctttgtctgaagagtgttgacaaagtccatgtcttcatattgccctcttaaagcctacaatgatctaatttttgtttacttgcacaaactaatttctagccattttcatttcaattccattgttggtttctagaaatcaggacttgaacgtgaagtggctttggttttatgtgtgtgtgttttgtttttggtgtccccatgcctaacacacaaaccaataaatgtttaactatatggatatgtgatttttttcagttctgcagttgcatttaagataggatctattaccaatatgaaggatagaacaacttctgaataaacatttgagtgaataagttactcttcagtcaaagggtaaaacttcattatagaatgttaaatgagtagattcttaattacttctaatgtcggagtaggactgatagagatccataacttattttcataatgttagagaagatacagaaagaggaggcttttaagaggtgctaataaagaaggaggaacagaggtctgaaagaggttttaatcaacttattgaggaatttgtgaacttccctgtgttgtattctttgcttcaaattattttacttttcttccttttattgaatattatataacttagttgccttttattttgcatttaggttacccattttagtatttataattcttcatgatctctaagaattttcatgagcccacaataatcactcatttctgatacattgatttactgatgccttttttagcttctgtatactttacttgaaattatgtgtactaaataatttagaatccgagtagtggcttctaaacatgtgatcatatattaagcatatattgagtaaagtatttagtattctatatgttaatagcataatttaaaaactgtatgttatgaaatatagatcctttcaagattaaaaatgtatatgcatgtagacacatatatgataaacagctctatagaaaaacacacatacagaaaagctggatgacttcatgaggacgaaatttaagagaaagataatattgtcaagggcagaggtatttttatgaacatggcaatttcgaggaggtaattgtagtttttatcagtactgaatgttgtaagaagcatttttcctaacaagaagaaaattaatgactttcttttctttttttttttttttttttttttcccgagacggagcctcgctctgtcacccaggctggagtgcagtggcgcaatcttggctcactgcaacttctgtctcccgggttcaagcgattctcctgcctcagcctcccgagtagctgggactacaggcacgtgccaccacgtccagctaattttttgtatttttagtagagacggggtttcaactgttggccaggatggtctccatctcctgaccttgtgatccacctgccttggcctcccaaagtgctgggattacaggcgtgagcccctgcgcccggccaaattaatgactttcacaaaataactttttgtacagtagtgaaggctgaagtctgactgtaggtatttggagtaatattgaaatactggaatttggactaatatggtaatattagtccaaatttcattgaagatgaaatatataaaagaaaatgaagactgtggttgaagagtattcagatgatacccttggtcttgaaaacatgggaaaggggtatatatacagtatgtatgtgtatgtacatatatgtacatacacacacatagagagaggaggtggaagatcagagccatgaaataaaaacagagaggtaagattctaccaagttttgactcatggattgtatatggtactctttcttttctacttaggtattggtttattaccagtatcaggacttgagctgaagaaaagatggatgtgcccaactccctaactaatatgcagtttctagaatactttgatttaatccatccttcctttactgagcttgcagcacctgtccccatgtactggttttatggccactttatataaagctattagagttcgttatgaatttgcactttaagagagcattgtgggtaaggggagagaccataatattgtatatggacgcgttacgctaaaatagagctcgccttattatgtacctataatgtaccagccactttcatggagacttgggatagagtagagaaggatatagataaggatacctgaccttatatagtttacattctagtgggaaagatggaaatgaagcaagactaatatgtaaagcatgtggaatgttagtgataagttccaaggagcagaataaaatgagagggtatgcatgtgcttgtagacagagtggcactaaaaggcctagctgaaaaagtggcatttgatgggggaaaatgtccaagtaagtaatttagggcctttttaggcatggggaaaaataaatgcacagccgtgtaacagcagcatgcctgtagcatcagggaaaaggtaagcgtgtggctgcagcagaaaaatcacgatgtttagcagcagaagaattcagaaaggttaaggaagttaattaagatcagaccatggtaaggacttgagcttttattcagctgtcagcgagttgagctgaatcctgttgtctctgtctgctgtgttgataatatataatcagagaacaaagggtgaaatataaagacctttagtatcctattttgaaacattcatacccctcagagatgatggggtactttgtctaatgtggtagtagtgagcaccatgataactcactttctggctatgttttgaggttagagccaacaggactttgtgatggattgaatgtgaggcttgagagagagaggggagtggaggattctgtttttggcctaaacaaaggaaaacacagattgaggcctaggacactccaaagtgcgagctcagggacatgattaggaacctgcaaaggagatggaggaaaggtgacctctgaagttggaggaaaactgtgttcaagtagtacgtgaagccaaattagcaaatacttctaagaagaaaaaggaatcctctcaatcaaatcatggtgataggtaaagtgagaactgaacatcagtcattgaatgcagtagcttgggggccaatggtgagactgataagagcagttttgatgggactgagtaagagaatagatgtgagagccagtttttgtttttgttttgaaccagtttttactttgcaagatagacctgtggaaggcctatgttcctctttgttgatacacagtcacttaaaatgaggacagttatcttcctttttcagcaaaatatatctctttagactttgtttttggtttttgtgcttttctgtgctttttaatgtatatttctgtgagttaatgggagacggtagaaattttaggaactactgatccaacctacctgaaaacagaagttcatatatttcatttgaggacgaacgtatgggtggccagatcccaggagaaatggcgattttcagtgatgtttatttacttaacctttttttttttttttttttaacactttttatatgtggttatttggacatttccacgaacaaggtactctcatcatctcttgtgtcaaaaatgtttccgtggccaggcacggtggctcacgcctgtaatctcagcactttgggaggtcgaggcgggtggatcatgaagtcaggagatcaagaccatcatggttgacaccatgaagcctcgtctctactaaaaatacaaaaaattagccgggcatggttgcgggcgcctgtagtcccagctactcaggaggctgaggaaggagaatggcgtgaacccgggaggcggagcttgcagtgagccaagattgcgccactgcactccagcctgggcgacagagcgagactccgtctcaaaaagaaaaaaaaaaaaagtttcctaaatttctttttaagattattgaagttacctttaagtagaatgagcacatatttcagtttgtcgggtatagtcttagcttatgtcaaaccatttttctcagcttaattattcctagctccccattttactataaaaactatctcattttgggaaataaatagcgagcttcctttaatcccctcagaagtcccacatggtaggtatctttattgctattttacataggaaatactgaggttcagaaaggtcgaagtactttattagggacagatagtaagcagtagagacagaactgataacagcagagcaaaaagggtgactgcaggcccttttgttgtagtatcttctttaacatctctttgttatactaaattttattatttttaatcaactatctacagctgtgtctgaaatgaaatgttttctgggctcttcactgtctcattcacactcttcaaggcatacttgtatgcatattcctcttcattttgcaatgttcctcttgaaagtaatgtgccctaacagaacccagatatcgtctgaacattgacaaatatgcagataccattgactgcttctttctggggtctatgtgtctctttatgcaccagttattcagtttatttgagctgtatacagagttggtaatcagcctatagactgtcagagaccattctgagtgacccggcattccttgtgatatcttgttggccctgctgaattaatagttaaatatgttgaacatccctaatacatccaaactataagctctgtttgctctgatatatattctgatacgctcacacctttttgaataatatccattgaaatacccctagcaacagcagagcatgtctgaaagaaagctgaaattataagtagaagagcagggttctaatattgaatctaaaacttcctaatatgatgacctttgatatacgatttaatcttactgatgctcagttttctcttgtataaaatggtatacaacaatgctgatttcttctttcttacaattattatgacatacatatggaaattatgtacataaactataatttggtagtataaggaatcttattttcaatgtggctattgcattgttttcaaaattttcacaaacctctctgtgcctcacttccctcctctgtcaaaatgggaaagtaatagtacctactttatagattattgtttttgttgtagttgtggtggttgttactgagactatttatattagaataactggaacaatgtggttaacaagatattaaaggtcaaatatgattcctgagatattcaaatataagttttgttctctgttagtaatattaattgattctagtaagcttagaataaagagattatgatgataacatttagagggctattgataatttattttcaatatttataaagaccacatagtgttctcattctactttttatatcatttcacaaaaactaaagcaaaagctcaatgtagataaaatagaaacccctctgataggagaagataactctaaaagtaactcaaagaacatcactttactcagcttgttgtcattgttcctttatgtgttgtattgtggtatatattttttctttcatctgtatattgttttctggataaagttcaaattctggacaccccaaatcctcctgtctttcttgatatttacattacatatttacttaaatgtgcttattttttctcctctaagatgctcagggtgctttccatataacatttaccttttaatggagaataaatgtaagtagtgaaaaacaagtatgccataagctgctaaggacagataacttagatcacaaaaactaataagttgagaaaatagaaatattggagcttcatctaggatcttacttttaactagatgttgtagctactctattttcatggacttttcagttcaaccaacaaattagaaccatccatgattgtgcacgttcctggaaacaattcaatactgtctttgtgaaactgaatttcaagacaactcagaagttttacctgctaattggaaagggatcctgggaacataaaatcacaaaataccacaaactgggtgctttgaaattttcaagtggaatgtaagatattaaaaagtgtctgtcactttcagagtttcttaactaattagacaaaactgagttttcatttgttgcccttcagagcaccatgtaaaatgtgtatctttcagctaagagataggtatttaagaaaataaaacaaaattactaccttatagattttttttaaattttactcttaatttattctcagttttaattagtattttatatattacagctattcctgatggagtttattctgtgaatgattggcttttttttttttttttagcattttgtactcttgatattgaatccagtattcctaattcatgaaacctttttttgtgattttaatagactccatttttagagtaattataggttcacagcacaattgaacagaaggtacaaaaatttcccatataacccggctcccacagatacatagcctgccccactgtcaacatttcccactagagtggtatatttgtttcaacagatgaacttacattgacacatcattatctcccaaagttcatagtttatacattagctttccctattggtgccacacattctgtgagtttaaacaaatttacaatgacatgtatttatctttagagtgttatgcggtgtaatttcactgccataaaaatcctcaatacttttcccgttcatctacacttctctcctaatctctagaaaccactgattgttttgtagtttacatagttttaccttttccagactatcatatattcggaattggaatctagggtgaaatcctgcggtaaaatatatagccttttcagattatcttctttaacttagtaacatgcatttaagttcttccatgtctttttatggcttgatagctcatttttaagcactgaataatattccattgtctggatgtctcacagtttatttatccattcatctactgaagaacatcttgattgtttccaagtcttggcaaatacaaacaaagctgctgcagcattcatgtgcaggaatttgagtggacatatgactcctttgtgtaaatgcctaagtgcatgattgctggatcatatagtagaatgtttacttttgtaagaaacctccaaactgtcttccaaagtggctgtgccattttgcattgccaccagaaatgaatgagagttcccattgccccatttctctgtcggcttttggttttgtcagtgttcttggattttggccattctaataggtgtgtagtggtatctcattgtttaatttgtaattccctggtaacatatgatgtgaaacatattttcatttgcttatttgccatctgtatacttcctttggtgaggtgtctgttaaggatttttgcccatgttttagtttgtttgtttttgttactgagttttaagagttctttgtgtatttcggataagaattctctaccagatatgtctttcgtaaatattttctttgagcctgtggcttttcttttcgttcttttggcagcatctttcacagagcagaaccttttaacttagtactattcaacttattaattctttctttcatggatcatccctttggtggtgtatctaaaaaactatcaacaaactcaaagtcacctctgttttctccactgctatctgctaggagttttatagttttacattttactctagagtctgtgattgattcattattaattaactttatgaattatatgaacaccacaattactttcaagcagttacacaaatttctaaattcagtggaaatgtatttatttttggtatgtttatttttcatttttattttattttttataatttcaacttttggattcaagagtaaatgtgcaggtttgttacgtgtgtatattgtgtgacactgaggtttggtgctgagcatagtatccaatagctactattttggaccttttcccctcactccctccccactctagtagtccgcagtgtttcttgttcccatctttatatccatgtgtatccaagaaaacatggttttcaaccataatgctgtgttccacaaaaatatatgttcatgttattttattttatttatttatttttgagacagagtcttactctgtcacccaggctggagtgcaatggtgtgatctcggctcactgcaacctctgcctcccgggttcaagggattttcctgcctcagcctccagagtagctgggattataggtgcctgccaccatgcccagataattatgtttgtatttttagtagagacagggtttcaccatgttggccaggctggtctcgaactcccgacctcaggtgatccacccgcgttggccccccaaagtgctgggattacaggtgtgagccactgcacccagcccatgttatcatttgtacagatatattcaatgttgaaattttaaagtgaatttgtgataaaattcacaataatgtcagatatttcaccatcaaaagtataaacttccaatgaagttgatccagtgaataacatgaaagtaaataaattggaattaaataattgtaattaaaacaaaagaagggtgtaaggtttatgcctagataaacttttttgcatgtagatgttgtgttgttcaggaccatttgtttaaagactttttctccactgtattgccttggttcctttgccaaaaatcaattgattatatttatgtggatctgtttctgagctttctattctgttccattgatttacctgtctgttcttttgccaatattactctgtcttgattactgcagttttatatcaagccttgaagtcagatatcgtcaggtctcccacttaggaaactctttaaaataaatttttaagaaaacctttattcaggccaggcacggtggctcacacctgtaatccccccgccccaccccagcactgagctgggcggatgatgaggtcaggagtttgagaccagcctggccaacatggtgaaaccctgtctctactaaaaatacaaaaattagctgggcgtggtggtgcacgcctgtaatcccggctactcgggaggctgaagcaggagagttgcttgaacccgggaggcagaggttgcagtgagctgagatcatgccactgcactccagcctgggcgacagagtgagactctgtctcaaagagaaacaaaaacaaaaagctttacatttgtagctatttctttaaattagatagtcttttcagatacataaaaatatgtggattattgtataagcatttacataatttaatgtgcttagtaaatagtgttgtctagatgattactttttctctgcaactatttctgatattgccatattatatgaaagagtttccctctgtcgcccaggctggagtacagtggcgcaatgatagttcgttgcagcctactcagactactgtgctcaagcagtccttctgcctcagattcctgagtagctgggactacaggctcctgtcaccacgcctgactaattttttaaaattgtttgtttagagatggaggtctctcgattttgcctaggctgatctcaaatccctggactgaagcagtcttcctgcccaggccttctgagtagctcggattacaggcctatctcttaactatttgcttttaaaggaatgtattagatctgcgctgtacaatcacagttaacactggtcacatgtaacctttaaattttaaattatttaaaataaataaaattagattaaattaaatattcttttattttcaagtcatgctgaccacctttcaagtgctgaatacccacatgtggttattggctatcatattggatgacacagatacagatcatttccatccctgcacaaatttatactcaacagtggtgcagactgtccatgtatctgttatttgccctcccatctgtactccagtattttacctggaaatatttttttaaatgcctgtggatgtaaatgaagtcttaaaaaatagtctcatgtagaataaccttctgcctcaaattcaagagaaatctttgttataatatgattgttaagtcacaggtgtgttgttcttactatattttaattgcgttatagttatttgaatagttatgttttaggacatacacattgttatagtcaacacttcttgatgattatagtaatgtagttctactctgtcatagtttaaaatttatgtctccataggaatattattagctaaactcaatagtatgaaattctggctattgttaactgaaataattttgcatttgtggttcaaaatgtaactcttaagggaaataaaggaattcagaaagttttttgaaactcaatcttgtcttccttggaaataggagtactttgattatttttgaaagaaaaattagcctacagcctggtatttaaatatatatgtacatatattatatatttctgctaaattatttatggtagtttattttttccatcttatatacatactggattctcaatttgatttttaataccgcctatatacttattagtaatttcaatggtgtatctttaaaagataaatttcattttagttatgtgacactttatctttcattgttatgaattgcctttttactttttgcagtcttgcgttgaaatgtatcagaaactataatgtaaaaaaaagctgagtagaaatcttataattaaaagttgtagcaagtcatgaaaatggctcatgcttttattgccattttgatgtttttgatggcaaaagtgttgagaaaaagtctttagattcacgtgataagctgacagagtgaaacatcttaaggcttgaaagggcaagtagaagttataattattgtgtagattcacagtccttgtattgaattactcatctttgctctcatgctgcaggccatagagcgagaaaaagctgagaagttcagaaaactgcaagatgccagcagatcagctcaggccctggtggaacagatggtgaatggtaattacacgagttgatttagataatcttcttagggatttgataaacacataggttcatatttatcagctgaattatatcagacaagcacttgttaaatacaaatttaaattaaaaggtgtttgtatgttttttattattctttttttaatgctaaggaaattattaggagaaattcaactttgagttcattggaagaaaatgggatgtggtagaatattttatcagtctgtagcagagaaataaattttaatgcaaatctgctagaatttatccaaataatttaagaaaataaggttaacagaaatttgaaaacattaacagtcatgttatatgtgtaaaactgatcatcatctgattttaaatcatttttgcaatatgtttttccaaacactaaaattatatggaatgttttaccgtcattcctgttttgtaataatatatatgacattttctgtgttactttttatcacttcctctcatttaaaaaagaagtctcttcgggataacctttacttttaagtaacttttttagagtgagataaaagcacaaagctagccaagtttttgtctttctttttcaagaataaattaaaattaatcttttctaatactcagtgcctcaaaagttatgtgtaccaaatgtgtcattgacatgatatgtaaacaaccttctttcaaattatcattgctatactactatatttccagataaaattttacgaaaatcagggataatgctatttccaaataagattatttttcattttgtagaagacgtttacaagaacatcataaataaatacaacaaatgtttttgttgtgcatgtcagcttttttcagaatctgcctgcattttggggcataaattctgtgtataagttattttttgccttaattgcaaatttggcattcaaaagttcagtggtcttcctagaaaatcaattcattttcttcttctaatgagtcccatgactgactgtatttggttaaaaatgaaaacaaacaaatataacaggtgagacttgagtgaacaagtttaagaacaggtaatgaaaataccagtagatttttatttagatgtatgttgcttggtaattttaactgatcaacttaacagcatattcatgttaaataaaattatgtgatctaaaaatattctcctagttgttatgtaagttccccctagaaactgtattatcactttttcattttaataagctgatgcaagagctatactttaaatggtctcatgtcatagttatatatcaagcttacctacactgaattaatcagaaataatttaaacatttagaaattacgggaatgatttttaatttttggtaagtaaaactacatgcaggatttaaatgatcgtgtgactagtgagaatattaattttcttgattatttccctcatagttctaatttttggaggcatgtagaaaagtcaggacacatagtaggtgcttagtaaatattaattgaccagattctgtttagaaaagcaaaattaaggcagtcgttgaggtaataacgttggtaattttggtgtgaaaataataatccatctgaaggaaaatgctaactttggcagataccagggaacactggggggtaggggtgtgatttgagacattcctgtttggttgactgtgttaatcaaattttatgctacccttttgttctaccagtaaagatatggtcgaactgatacgtcattaggctcaagtttgggccataactaggatgactacttaaaatgaccatagctctgtttccccattaaataaaataatttatgaaattacttaaaggctcaaatattctaacttatctatttgttccgtttttgtcgttcaaggaacaaattgcataatatttattttctgtgattgtgcaaattgtgagataagctagacacatattaagtgcctgaagtaccccttcaggtgtatttcagagggactgctaccctaaatcataatagctcctttagtatagagcccaaaagtacagttgagtggtgtagctcatgaagctgaaagacaaatgaagctttctgtaaactaggagtccagcaattattgcattaaagctcttaaatttataagtccagaatcttccttcccaagcttaggctatggagatataataaatctcacaaccacgtaagacacatacattcttgccctttttgtatagaaaggaaaatgagagctgaatcagtgtgcttcatttaggacctcatgtaaatggctgttcctcttaaccacgtatagtttcctcagaagttaagataaagatgaaccactcttgtataaaccactcatattattatgccactaataaaaatatgtgcgtatatatttataaatttgatgtgtgcttaccacagtgaaaatatttaacatatattcatagtgtaaaaatatgtagaatagcataagtatagctattatagattttaaaaaattctgtgaactatattttatatgtatctatactggtatatgcatagcaaactgaattttctacttaaaataatttgccctaagattaaactactttttaaaaatttagaataattttgtaattcatcagtttgcttttagaatgaaattccaagatggaaaaaataatttctcataacttaaattttacttcagttttgacctgaaatggtacatcagacatatttccaaatgatttctgtccgtttctaaatgtctatgaagcattgaagattcaacatcacttaagtaatgcagaaaacaaaatctgtttgtcctgaaggcaatttgttgaaggaatttaagacatatgctgagaagacaggatagggtgttaaggttgttgaaagtacaaaatttaccatggttacaatgtagaagggaacctcatttgatggtgcaaagtattgttaaaaatcagttgtacgttctagaaacagtatgtctagtaacatatgtacagtttttcagtgtcacatacaagttttatgatcaattggaagatactttttattttcactgtattttatcaaatgtgaagagttgtatgcagaattttaaaacagttaatattaaccatatcattaattttacagcaataatttgtatattaagagtttattgaccgtaagagattcttactaatttatttggaatttttaaccaaagaaatgagttggccaaattccttgcctgctttaaaactatacatggacgttttccttatggatgttccagttcttttggtcagagtagaagtgatctttcacgatcatagactaaaaagagaagctactaaaaggagagtgttaactaaaaaaaaaaatcacgtttctggcattttggcatgaaattttggtataatttttaactgatttatctctatcttagctgtattttttgtttgaactaacattaaaattaatttactgttcttatgtcagcattaattggttggataaatgtgacagaatattggatggtgcaaagtacctctttttactagagacatttttggatagctgtaattttcatgcagcttaccgtcaatatgtaagctttggatcataaccctggtctcaggaaactgttaacttaatgagggcaagtgagaggctagaccaggtatctagtgatgtatttatatattcatgtagctgtgcatattgaaaagggagtttccaaattctttattttactttttaagaaagatgtgatataactttaaggtttatttttacatttcttaatttaaatacaaaatgttataaataatttagaaatttagaaaaatttagccattaaatatagtaagtaatctttctaatgctttaataatattgctaactaataatggttttctaagattttaatttgaacagtctttaaactgatgcctttcatgaccaaggcctttcagtgtattattgagattgtggagttttaggacaacctagggctaaaataatatacatatgattatacctaaacatatgtctgtttttatctatttaggattagacgtaatcctttttgtaaaacagtgttctcgcatgagtacatacagtctcatcaatcaggcataacacaaaaaagcctagtttagataaactggttttccatattaatactgaaattaccaaaagatgaccatatcaaaacatttatttgaaaacatatgtaggcgtagctcaggttctcgttctttagtctctaagatcctttcaccataatttctagaggagatactataattatgtaatagggttagttaaattgtgattcattttcaatttctatttgtagttttctgtgtgttaattaagagtctaaggacagtcacatcaaggacatgtttaaataaaagtagtaattattagtatattagactaaagaacatctcaaaactatcattccctgagtgctagattatagtgtttaaggtgatacctgataataagtatgctaactgttgtaattaaatggcacagaatgataacactgacgagagctcttcttatccataacattaaccaagtaactatctttttttcttgtattttggttcatagctcattagataatttcacatgaattatgttatttgaggtgggcaaccagattttgtcagatgggtgagggtagggattatggtcagtctggctcatctcaaagctaaaactctcatgatcactggaaaaactttcagtagcagcaagtcttctaatcatatattttaatggcaagacatattgcaaatagtctgtatacaaatgtggcatggagactgtaccacttgtagtagcccagccccttcatcatgaatgagtagccttccacagttgcatatatttcctcttctcttattccttcctcagtactgggcagtttgatttatatttcttctttctccacatgacacttagtataatgctctacacagagttcacattcaataaatgtttttaattgacaggcacatttttcttcgtttaagtctaatctccaaaaggaagagcctctgtgggtgtgtgtgagcacggcgtgcatgcacgggtgaactcgcatgcgcagacatgtgcgtgtgtgtgtccatgtgtgtgaaagaaagagactgttgttgtcactgttgttgtgggaaatgagtggccaaaacaaatatgagtaaaaatctgactttttttaattttatgatgtttgaaaataaaaacgcaaaagggctatattagtaaaatttatattgccctcactaggggtattacttttatatatactattaatttttaaaagctattactttaagtcagtgtggtcacagaaacctctaaaatttagcctcagaacttgtcttcacaggttttgaatatctctatattacattttagactattacattgaatgctaaatggacttgtaataaccctcacttaaagttcagcaaaaataggagactgtttattagcagctttattttaagtttctattccaaatattcttttaattcaagagctctggaaacacttgttttgtgttattctaccctggcttcatggctaatgatgaatatacttgatgaggaatacttcactttaagtggcagttctgaagtacttgcatggaaggtggtgcacatttaacattattctaacagtctgttatgcactgtacacaagtaataaaattaatggatacacttcaagtaatgatccatttcctctgggtgcaatatatttattcacagactatttcaggggttgtttagaatatgagatgtgaatggattatgatccattatccctgagattctaatgtgctacaacaaaatggtttccataagtattgctcataatgcctggtgtgttagtatttgtattcttaaatagctaacacaaaattagaaaacagatgctcagatgattgatacttaaaacttttcagatatttacacttacaaactcttagaaaagttaaaattttccattgagtcaaggagcataattctatggaatacatataaaacaattatatataataataaaatccatatgcaaatatttacttggataacgctttgaaccctttttcattctagaaaggttttaatggactttcttagaaaatcaacagtagttctggcatttagatggtcaattaattcataaagttgaagtaatagcatttctcattttaattgaagagaggtacattaagtaatgtgacagtgtcggttattaacgtgacagtgtcagtaagtaacgtgaccatcctctccatcccctgcccaagtattttaaagcaaatttgatacaagagagattgtgtgcttgtttgtgtatggcttttggcttcagtgtacattggtctcataatttttatattcatatagagtacactattgatttggtattgaatgagttcatgagtacagtgtagttatactctttctactccaagctgagaattctattagatactgccagtggagacatttcctataggagtttatagtttagaaggacagtttatgcccttgttgagcaggcagcatattcacaatgaattaatacaatgtttgcatacaaatccttcatagcaagacttctgattttctgtgcccaacattatgtcttttctagtaacatctagaaatttccacgttttttttgaaatgttttcgtttctttataacttcaatctcacatgattataaatgtggcagaatattccaggattcccaaataaactctttttatttttattttagttggtgacaggctcttgctctgttgcccaggctagaatacagtgatgcaatcatagctcagtgcagcctcgaactcctggtctcaaaggatccctggttattgataaaacttctttaaaaaatgtataaatacaccttctatatcccatattagtcatatattatataaaattaggactaattttaaaatagtattattaactttttatacatgtcctgtttcagtcattaagaagacttcctctccccctaattttcacacaagagagctggtcccttgttttctgaatattctttttcatttcctctatatggcattgtctaatatgtctttgttgcctagtatgtgtcagcatttgttataagtaagttatatatgttaactcagaactttggtaagtatcctatgaggtcgattctatttttaatcctcatttcatggatgagaaaaacaagatccagtgaaattaagtaactgaacccatttcacacatctagtaaggggcatcaaatttgaactccggtctctttaacgccagaattctcaccggtcatttctctgcctttctgcctgcctccccctttttgctattatagatgtcgttcttttacctatcactgcattttcattgcctgcattcagttataaagatcaatatgcaaataaatagagcgtattataaatttcagtgttatgaatttgtacaaagctgacttttcttcaccatttaaatttcttttacagtgatatattgcaacattttttggggggcaaaacatagagttttgtgtaatgatcaacaatgactcattaaaacctgtccctagattttaacggatactgcagagcctattggtacttcactgtagttttatcatttaacaaaattaacatatccatattgaaaatcaacttatagtttcattttttcatttgctacgatttgtatggttgacctttctcagggacacaaagtgatttctctctgtgttcccgtctcatttagacaaatgttgaataagactcaatccagcatcagtctatcggtccctttaatttagcatttcttttttgcctgtttaatacctggttcatgttgacgtttcacccttcatggacttctaactgcttgttcaagttcaacatatgctgaaaatatttctcctaaatatctgatcatttagatccatgccacattttttgttattaacataatttaaaaattctgtccagtatattttctaattatctttttattttccagaaatgttaacgttttatcataatacttttttcaaacggagtgctcatacgattgaagtttcatattcttctcttacactttataccaaatgtggtcattttataacaacagttacttaatcgcatcgcttaacaaatattttggtacaatttttgatcactcctcaaaatctaacgatcaaaaacagcatgtcacaattgcttccttaagcattaggaggatattagaatatgtagctcctgtaggccacggacttcttttatacttagatatatggagccatgtatatattctttttacattctattatttccattgtatctcattaaaaatatatcagggaagaaggaggggaaaatagttgacgataatatttgcaaagtttgtctccttcaccgccatcctgagtagcattatgctttgaaattagtgaagttacagttgtgtttcaaatgaattgagggacatggtttggcagcattaatatcattatgacaaatagaacattagactatcagggcagagggaagtgaaagaggataaaataatatagttgttgaattcacatctatattttttttagtctttaaaaaggataaagtgggaggcatgtgcaagttagcaaaaccacaggccttatgtttctagagacgttcttcagactttttaagaacttagcttccctttaactaaattatattaccagaaaattaagtaaaatgaacatttataaaagtagattatcttaggcaacctactcttctaccaaactactcttcgaacttttaggtattttaacctagagaaagaaccttacagtgagtttatgttcttttgagatctctgtaggtacatgagggaacataaaacatttaaatattcagtatttccaaagtataagaaagttatcagtgctaatgtagctatgtttaaaaatgcatgatatcatatgtaatatattttctcttttatattctgtcattaagaaaactatataagctaataaatctaagaaagtctaaattttgtaaactaactttagagagtttgaatattttaacccatagcacagcgtgatgttgccatgctttcatgctatgtatggaataatatgtacttggactggcgttcgtcatatatgaaatgacatagcatattccatggtacatagtaggtactccagaatggtaatggtgataatgatatgcttgtgtttccatttttcccttgataaagttttctgggtttggtattactacagatgattttaaaactttgagatcaacttctacatttataaatttaaaaatgtttcacattagaaagattatttttcctagtacttgtttttcttcctcgcatccatggacaatatgagacagagtctcgctctgtcacccaggctggagtgcagtggcgcgatctccgctcactgcaagctccgcctcccgggttcacgccattctcctgcctcagcctcccgagtagctggaaccccaggcgcccgccaccacgcccggctaattttttgtatttttagtagagacggggtttcaccgtgttagccaggatggtcttgatctcccgatgccgtgatcccccacctcggcctcccaaagtgttggaattataggcatgagccaccgtgcccagccgacaatctgtttatttctaatcttctgtaaatgaaataaagaataatcttggattttttttcctctttttaaaactatgaaaatactatttaaactaatttccaagcccatttttaaaattaaaaatgtaagttagtttggggaagtatatttgagtaatatgtatgatatgtaaaatgtatctgaaaacatccaaaatgttacttgttcatgcagccttccagctcccatcagagctttgagcacttttgtttttatttaagtttttatttaatattttatttacatatattctaattttctacatcttatgtcttattacttgatggcattgatattcattgttgtgacgcaagtctgataattcacattgaataatctgaaatcatatttacacatttatatcttagaaaataattgatctggtttgaaatcattcatgtggtgaatacttttataattaggatgtgttggctttcagatcatttctttcagtctgtgggttcaggggatatatttaattatttttttctttctagagggtgttaatgcagatagcatcaaacaagcctcagaacaactgaacagccggtggatcgaattctgccagttgctaagtgagagacttaactggctggagtatcagaacaacatcatcgctttctataatcagctacaacaattggagcagatgacaactactgctgaaaactggttgaaaatccaacccaccaccccatcagagccaacagcaattaaaagtcagttaaaaatttgtaaggtaagaatctcttctccttccatttggagcataatcaataggtatttcttggcaatttccaagaagacagtaacaaattatttagtaatgaaacgttcaccttctaaggatttagctaagcgcaataaagttcaaaatgtaagcaacagaaatctgtttaaatatgtaagacgtagatacccggattctaaaattgtatttggcgtagttacacagcgctaattgattgtgtcggtttgcgtaagcatgaggcagtttaggagtgtggaaaccacatgtatcctgtaaaaaatggcctctcactttggaactctttctttgtgacgagtgaaacatagtcattttgaaaaagtggaatccatggaaatagttagaaacacgggtcaacaacaagcttggatgcagtataactagatacataaggaaaatatttaaaactgatggacctctcaaattacgataatttgaggaaggtttctttacaaaaagatatttttaaaatgtagctggagtacagaggaaccacaccggatagtgtagtaacccagcatcagagttcttaccccttttagtccagaaaggatcagtgagagagcagttatagaaactcagaaggagacagtcagatcctcatggtaaaagcagcatggccggcttaaggaatcctcatagaaatggagtcagacaaataaacaccccacttcacttttttccctgcctccagaatcttgtcagggctcctcactgactaaacttaatcgtaagacaaaggacaaggaaccgtcatctgtaaatatcagtctcctgggtaacaggagaagagcggacagtggatctggaggggcaaacaagatgtaagtggacaaaagggcctgagaaagagatgaaaggattatgccttcaagtgtaagaaaacaagagctgtataataatgaaaatagcctaaactgttttcattgttactatgagctatgtgcttttcgcggggaatgagaaactgattagaggatggactaaaacgtttccaggatgaacgtttagtgatagatcgagatgattacatttaatacaaaaggcaaggagtggagattcatttgcatactgtaaaaaagaatggcttaaataaaggtagaatagacatggaaaggtgacaaggttgatttagaaaaggtattggacccaaaaagtgatgagaaattcaaagctattttgaagagaaaaacaattgaaggacttaatggttcttcaaatatcggacctgtagcattattaggttttctgttcttgtgttagtttgctgaggaaataaactcagaaagtatacttttggataaagaataccttggataaggcacttgacttgttaggcaaatacacacatctaaggaatttctacattgagatgcattttgtaatttaagaatagaaccaatgccgcttttcctgtgaatcagaggaataatccaaatacattatttcttgccacaaaaatctgatgttaccttatccgattcttgagattcagatatagtagttagtaatagtacctacacagtacattcatgcataaaatatatacattaagtgtctctaatgtgtttaagaatgctactgagtgtattaatcagctgagtctgccacaataaataccacagactcggtggcttaaacaacacaggtttattttctgagagttctagaagtgagagaaagtccaggatcaaggtttggtagggttcagcttcatcttctggtgaaggctgtcttcctggcttgcagataaccaacttctcactctgtcctcacatggctttcctctgtgtgtatacatgcagagagagagaatgagggctatttttctttctctctctctttatctctgcctccttttataaagccaccaatccctaagggattagccccccaccccgccacccttacccaaccctgatgacgtcatataaacatcattacctcttaaaagtcctatcaccaaatagtctcaccaatggttaggacttcaacatgtgaattttggaagacacaattcagcccatagcactaagttttgggaatattagagtgggcattcatggactctgcttttattgtatttacggaaagcagagaagagagatatgaaacaatggaatcaatatttttaaatttcctgctaggaacagtggtttaaactaagatgcaaagctttgggagaatgagtaacagggaaaaacgaacctgatacagccaccaagggcatcttccttgagggaggaacatttgagttgagacttttgtgataagttagaattaggtaagagaacagttaagcaagattccaggcagaaggaacatggcaagagggagcaataaaggccaagcacctgaatgaagaccattgtaaatgctgaacatagaggggcagatgaatgagaggagagacaaacaggaatcagtcaggtatataggagacaaaccaatgacttctgggacctgctagtatcttggtcttgatttgaggaacaaatggagatcaccagaggttttatatattaaatattgtctggaggttgaggaagtcatcctaagggaaaatacttctcttactgcatccaaattccgttgtcacctccttatcaccccttactctttctctcagacccattggtgtctattaatttgaagaatcactttaggtaaaatatttagcaagataagcttaatattattcatacaagggcaaatatatatactgttctgctgagattagtgataggtaaataaattataacatgtttctcagcgttttattttatttggagaagttttataacattagagcgcatatttagctcatattctaatgatcggcagaactggtttttaatattgtgggggttagagagccttatcagaattggaaaaaattcatgaaccctttcctgtgaaaaatacaaaagcttccatgagataagcatataattttaaagaataaacagactcaaaggagataccatactctggaggaccaactaaaccaaatccttttatggaaataatggctaattgttcacatctttttaaacacagaatacttcagttgaaaagtatctcttctatgatttattctcagaacattaaggtctcaactgaacatttgcccaaatgttttattagtttcaaagtcccctttgtttttcagagcacacttggctataatgttggctctttctatagccccctgaacgggaaaaatggcagccctccatctggccaaatataaatcaggttcttaatggttcacagtagatgccaatgctgccatttgtaaatctagcatacaaattatttgtatatatttctgtactataaatacagaatattaccctttacctcttgtcttatttcttatccatggatatataccaactttctagcactggtttgagaggatttatatttgaaagagaaatataggtcaccttccattttgctaaacgtctttaatcttcacccaccaaaacgattgaatcgtcagagattattttacctgaatcagctcataccattataaccacataaacacattcctctgaaagctgtatttatgtttttttaatgagaataagtggcattgtacattagtcttgcaaccatgacagaatttatgtgataaatttctcagcctctcctaatacaaaagttactctctcccaaagagtatgaatgcctccataaatattaactttttttttgccttttcactttgattttcaggaagctcagatttcaattcgttcagaattggtataattctttccattttctctttcttctaatgggctcatgttccaatttttaaatttcaattttcctgttgttacatattaaatagtaactaaccctcaagtatttttttctaaagacagcatatatatgaattgtaagtaagcagccatgataataacacttttaaaaagggcagtgaaaactttgagttcaaattatatatgtattaaatacgaaacaattccaacttcactggaaacaagaacatgaaaacatttatgtagagaatagcatgcccttcgcccactttttgatggggttgtttgtttttttcttgtaaatttttttgagttcgttgtagattctggatattagccctttgtcagatgagtaggttgcaaaaattttctcccattttgtaggttgcctgttcactctgatggtagtttcttttgctgtgcagaagctctttagtttaattagatcccatttgtcaatttgtcttttgttgccattgcttttggtgttttggacatgaagtccttgcccatgcctatgccctgaatggtattgcctaggttttcttctagggtttttatggttttaggtctaacgtttaaatctttaatccatcttgaattgatttttgtataagttgtaaggaagggatccagtttcagctttctacatatggctagccagttttcccagcaccatttattaaatagggaatcctttccccattgcttgtttttgtcaggtttgtcaaagatcagatagttgtaggtatgcggcgttatttctgagggctctgttctgttccattgatctatatctctgttttggtaccagtaccatgctgttttggttactgtagccttgtagtatagtttgaagtcaggtagtgtgatgcctccagctttgtcctgttggcttaggattgacttggcgatgcgggctcttttttggttccatatgaactttaaagtagttttttccaattctgtgaagaaagtcattgtccaaaagaaatacagtgctagccacaaattcaagccacatatgtaatttaaaatggtctagaaactatattaggaaaggaaaaagaaacggtaattgaatttcaatagtacattttatttaacctgattcatcaaaaatattatttgaaagtgtaatcagtatttaaaaactttgagattatgttcttagcttttcttaatcttcagaattaaacatattttggtaatttcatgcatctaaatttggaccagccacatttcaggtgcccagttgccacatgagctagtgacagtacagcagtgttcatgtgattttatcatacaaaccagggtactactgagagtgaaacagggtgctactaataattatgccaggacaacaagaggaaacctggacagccaccgtaatttaaaaagtggcaattggctgggcgcggtggctcacacctgtaatcccagcactttgggaggccaaggtgggtggatcatgaggtcagcagtttgagaccagcctggccaacagtgaaactccatctctactaaaaataaaaaaaatttgctggacacggtagcgggcacctgtaatcccagctactcaggaggctgaggcagaagaatcgcttgaacctggaatgtgaaggttgcatttggccaagatcgcgtcattgcactccagcctgggcaacaagagcgagactctgtcccaaaaaaaaaaaaaaaaaaaaaaaaaagcagtggttgcctgtttggtcaggagaagtaatgagaccatacaaaacatagaagattatagatatatttttatatttgggtgtgtacatacatatgtataagtattatatagattttatatgtgtgtatataatctatataattgtatcaaaatatatttataattatagtatacacatatacatatatgtaggtatatatgtaatttatattttgcagaaatgaaagagaaaatattgttcattgagtgagcttaaaatttgaagcaagcgcacatcattttgatataagaggggtgcagccaaacacctatatttgatttatggaaaggatttaaggtcatgcatagtatttttccactgtacgcattcatacccattaatgctctaaattatgtcatcttgaaatttaaatatcattatataggatgatacatattgaacaaagagccaaggtatccttaaatgtatggctggtgatagaggcttgtctatactgtcatggatgtttcttatcagatatttgtgaagggtattaagctaaacttgccttactgctttttaataccttcttttgcaaaatgtaatgtatgcaaagtaaacgtgttacttactttccatactctatggcacaggatgaagtcaaccggctatcagatcttcaacctcaaattgaacgattaaaaattcaaagcatagccctgaaagagaaaggacaaggacccatgttcctggatgcagactttgtggcctttacaaatcattttaagcaagtcttttctgatgtgcaggccagagagaaagagctacagacaagtaagtaaaaagcctaaaatggctaacttgacattttccaaaatggttatttgtggggaaatccagaaggtactaacatgaaacaataatttctgtaaatggaaccattctccctacaacctgtattaacaaggaacgaaatactggtgtaacagataagctgtctgtagatttttttgtcctcataataattttgtgactttgagaaacaaaacatgttttgtatgggaatagcttctccttgggggattgtagatttcaaaatcagatgttttgaatatagaagaaaataaaagagcagttgaggtcatatgaatacacttcaattaagtctggctcgctgtatatacaaggatatttgctaggcatcttctaatatttctgtcaatttatctgaagagtattatagctttagcatacatgtggcaactgaaactcagcaaaggacaaattattctttgggctacattttactactggatcactataattacataaatcctattttttcctttgatgataaaagataaaagtggagcaattatgcaaattcatgccatgcgactagcaaatttttcaagatgtttcttttgtctcttcctgaattgctttaataagatgatgttaatacatagtatctgctccaaaatatctctactcatcaacttagttttaagacaaaaattcttttcagagacagatgaatgaccacctttaagaaatagtaaatggggttttgattcactatatacatgcatatatgtgttcatgtgcacacaaaaggaattattgagtaaaatcgggtttgaaggcattaagataaaagtatttttctgaaaaaatctctgtcccaaatttgtcatgagaagcacaggaacatgtgtttgtttactactaaaacttaaattagttggaaaatatattatcctattgcttttctttgtaaatatttaaagaattcaccatataatatcatttccagaattaatgtagtgatacacaacgcttttctcatttcccagcttttcattttttacaaaaatgaaatgagctaaataaagcaaaggataaatactttttttttttttttttttttttgtacttcagagtcgtttttgctaaggggtttattttcctgtacaggtagtaaaactttataaatagtatcagctccctctagtggatttcagtatacttgttactgtgcctctgcaaaatcaatttgggaaaatattttaaatgtcctagattttcaaatattgacatatttaacaataatgtattttcacttgtcattacatacataactcccccttaaagttaaatacatttagtggctatgcagcaattgttgtgcaaaggagccatttcactggaaatttactttaatctgtatatacctcttaatcatattaaagttcaactttttatcatttactttaaagatgttcagaatagcaatgtttgataactgagatttgtctatgatgttacaatataaatacgtaataatatatagtctctattcatacagctctccatccatccatccatccctatcatctttcttctcttttttaaatttcatacctacaaacgatgattgtttataaaacttcctaactttttcactgctattatatgtaaacaaattgtccccacttccactgtagctacacatctttaattttactattcacccttttggaatgcttgtctagattaataaataaccctttaattaaatatggtgtatatatatatatatatatggaatgaaaaatgtagcatatgaaattacatagcagttgattttgttaatttgaaattaattcaaataattgcacatgtgtatgcattatatccgaactggcaccagggagtaaatctcatttcttgtattcctccacagtactttggacgtattaagtatgcaggaaataagagctaacagaagtgcctaggcatccatactgacttttatttcctctttacttttttaaacttgctttttcacacaaaaacctggcttttaaaatatactatcagtgttggaaaatggcataaggaattggtagttgttacctgacataagtgatagaagaaaataatataaaaagataaaattctattttcaaagcactttttactctatgcataactaatttatacatcattttacctaaccctcagagagaaacacattgagtatttgttattacaactatatcacaagtaagctaatggggtttgaataactaaaagcatggatatgggatgctgtaagaactagatcgtatacacgaatgtccataacaacattattcataatagccaaaacgtagaagaaacccacatgtccatccagtgatgactatatgaagaaaatgggcacatccatacaaggcagtgttactgagcaataaaaagggagaaagtactgatacatgctacagcatggagtacccttgaagacattatgctgagtgaaagaagccagtcacaaaagatcatatgttatatgagtctcttgatataaaatggccacaataggcaaatctgtacaggcagaaataagattagtggttgcctaggtctgggaggatgagggggtggaattgtttcccatgacagttgataaaatacttttctagagactgaaaaccagtaaactcatgttatatgctagatgaatatagaaacacagcatctagtctgttgtagataattgtttcaacaaagaaaaaaatgaaaccttatttcttaatgtaaagaaggaaaaagattggtcatataatttgagtttatttcattaacaatttggaaatcatgttaaaataattattagggattttattggtttggtttagttttgcaaaaatggagaaagtgacattattagttatgacaaagccagtgttttgactgttctaaagtttcaaaatgattctcttctgttctacaccattagattgctttcagaacagagtcttgctcactttttcactaataaattcaagaaatatttttgaacacctggtatatgccgtaaaagtgctgggcactaggtaatatacatggtggagaaaatcaagagcaatatgtcttcatggagcttattgaaagaaagataataaaattgaatatctgaatattattgcagattataattactttggcgtctgaaaccgtgattctggggagatgatgttagaaccaaacctggagaatgtgcaggtgccagctatatgataagttggagaaaggacattaggagaaatgaaaagaaacacaaattgccaaaggtgaagaatgagggcttggcatgtccagaagacataagggaggccagaaaggctggaatgtaacaaatcaatgaaagattaggacaagatgagggtagaattgctcttatagaacttctataacaggtttggattttaagagcagtagacatttccgaaagaatttcaattgaggaaattaagtacccttagttgtattttttcaaaactcaccctctagctggtatgtgaagaagaaatgcaatacaagtctgaggagaagcaggaagacttgtggaaagaatagccacacagaggagagtccattgaaccttaaactacagttgtgataagataaagaaaaatcatttcaacccttgaagaggtgatgatctggggaggtgtagcacagaagatattcttgccagaattgaaagaaaataacttttacctcttacagagacagtagaagaaaattttaagggtagccagcaaggatgctctccatggccacaatttcaagctctatggttagtctctacccctccctgttaggatgctgagactgggaattaaaacaaagtttgatgtgaggtaactcttctagctgcagttcaggaaattgacctaatttactttattaaaattttaaattttttattttaaaattttatttttaatacatctaggcaaaggaatgttttgttccagtagacacataatctgttgcattgctccttcactccagaaactaggtaaactgtttgtaaatgttccttttaaaaattgtgttatttttatcaataccatcaagagcaagcatagcagacatgtttatttaagcaagctatgtgcttattgtgagataaaagaattgttccctgacctcaagaatcatgggaaaactcgctaaatgccaagttaaagctatacatatatatatacacacgctgtgtgtacatatacgtatatgtacacaagttgtgtgtgcatatacgtatgtacatatatacacatactgtgtatgtacacacacagacacatactgtgtaaatactcacgtaggcaaatattgtgtatatacacacgtagacacatactgtgtatatacacacgtagacacattctgtgtatataaacacgtagacacatactgtgtatgtacacacgtagacacatactgtgtatgtacacacatagacacatactgtgtatatacacatgtagacatatacacacacacacacacacacacacacatttataaaatttatgtgacaggaacctcatactattttccaaaatggctgtactaatttacattcccaccaacaatgtgtaagtgtacttttctccacagcctctccaacatttatctttcatcattttgaaagtagccgttctaattttaacatgtgtaaggtgacacatcattgtggttttcacatttttctgatgtttagagatgttgagcattttttcacatatctgttggccattggtgcctcttattgcgagaaatgtctgttcatatcccttgcccatttttaaatcaggttatttgttttcttgctgttgagttttttgaggtttctatatattttggatattaactccttaccagatatttggtttgcaaatattttctcttgatctgtgagctgcctcttcactctgttaatagtttcctttcctgtgcaggagctttttagtttgatgcaatctaatttgtctatttttgcttttgttgcccatgccatatccatttgagcattattcataacagccaagatacggaaacaacctaaatgtctattacaggacgaatggataaagaaaatgtgatatatatagtgatatatgcatagtggtagatatatatagtgatttatatatactgatatatagagatatatatactgatatatatagtgacatatatatatagtgataaatatattccagtgtctatatatgatatatatatgcaatggaatactatacagtctttaaaaggaaggaatttctgtcatttgccaccatgtagatagaactggcggacattaggctagctgaaatgagccaggcaaagaaagacaaatactgtatgatctcacttatatgagaaatccaaaaaaaagtcaaattatagaaacagaaaatagaaaggtagttaccagagactggggggaagaggaaggttgggaaagggaaggtgttgatcaaatgatagaaagtttcagttagactggaggaataaattgtagcgatctctagtactgcgtggtggacacagttaataaaaatctatgtttcaaaattggtaaaagaatagattttaatatccgcatcacaaaaaaagataagttggtgaggtgattaatatgttaattaacctgagtgaatattttacaatgcatacatagatcaaaacatcacatgataccccataaatacacataattattatttgttagttaaatatgaaatagtttaacatgatattttgaaaataggattgctaagtggatagagctgcttttagaaaaagggaaaattcagcaaaagaaaaaaactcttaaattctaataaatatttctgtagtgtggtagtttatacttacacaaagttggtcagaaaaatgagacttacctggaaaataaatcagttgtccaggaggtgaataatagagcagtatttatgaaaatgaccccaatttcagttggttcattggagttttatgacttataaaacaaattctatggtgatcttagataaaattcctataaacccatctatttcactcatgtcagaccacaccaagtgccctttgtgagaatggagcctgagcagcagcgactttcagcagagcaagttgcataagcaaaaaggcgtgaagtaattaaaaggcatattttgactggaggatagaatattgattttgataggaaattgggctaaaatgttgattgaattcccaatcacaaagatccttgtatttcaaactaaggaaacaacttatatattgacattagaaattcaagttatactcagacttccttgcacttgtaattatctgaaggaccattcctagtatgttaatcatcatatatcatgcatgggtcctgttgtatttcttgacacctttgtcagtgttcacattttagagaaatgcttacttttgtcatggtctatgttatttaataaagtttggagcctttgctgattgcattatctccttgactttagattgatcatggggaatgaggaaaaaggtgggatctggttggcatggaattaaaggctcaagttgagcattttgccgaagtaggtatatgtcattagttcagcttcttcacacatgtgcagtgcatttttttccccacaggtaataatggggaattcaaattggactcgatttcatattcacaacaggacttctaatgtttttaaatgctgtcaatattaagactactaacatatcatctctttctccccctaaatggattacatgggtgccttttccagcttctatctaagcactatccaacagaaaaataatgtgagccatatatttaattttaaatgttctagaaaccacattaacagatcaacaggtaaaagtcatttgaaaatattgtttcatcttagaattaaaattttaaaatgtggaaatagctttacattctttttgtatgaactgtccaatatctggtgtgtctttatatatacaaaacatctcaactcaaactggccacgtttcaagtgcttaacggacgggtagccagttgctaccttattggttggcacagttacgtcttccttctctctattgtacattctctgatgcttaagtgcctattttctgagtagttctatttttcaagaggagagattttttttttcagtaaagtgttatatataaccgattgctctggtatctctttatctcgatagttatgtctctcagaattttcaatatacttctctgtttactttgctttccagttaaagtggtttgcccttgacatagactcatgtgtattagaaaatgtagcatctaatttcatacttagctcttttgttatcacaaaagaatcttgctttgcctctcttggtctgtcctttgctctccttttttctctcttcttttccctttagcccctccctcttttaagagttaaagacaagcagtttttaaacaaaaggtgcagaaaacttcttttttgtattcctttactataattttagatgtcagtttgcctatactttatcacttccatccctcacatggctatattaaatgtctagatattaatggaatttttttttttacttttcaagataaacagtagtgcaggataggagcccttaatttttattttcccaataatttacagcacgtgcttccaagcttgcaatcacttatattgattttcattttgttgaatatatttcactaataaaaccaaaaagatatctgcatttttaaagtggtcctttagcagccgaatagtagaaactgtcataggaatactttctttagagaaaaaagttacatatttataagcaatatattggctaaacgttaaatcttcaggccatatttttcctgagtctgtgctgagtctaatgatgtcagtagaactctcgaggtcttttaagatggtaggttattagattggatatgtttattgtcttattgctgtcagtaaagataaacttatctgttggattattaatctctatttctacataaaaggaaaaaaagtgagtttccgtagatggagctggtctatttctgctcctatgttgggatcacaagggcagcatctacagatatctcaccagctagtaggtggggcagctcatactgtgtttgcccttgggtacattagcttctgtataagactttttctttcttcttatctgaaacagatttagaattcttcactggcattccctggcctgcatggtttaaatgagatactctataccgttgcaaatttgtcaagcatttcctgaaccttgatagcaattactgctgtcattacatagtgtcattacattccacataagaaaatcagaaaaagaaattgtgatatttatgttagtaggtgtgtatttttttttccagcttgcctcacaaactatattagatggacaagttcccaaaccaatctttggaagtttatttcttaaagctacaaaagaatttccaagagattagattttttgaaatgaccagtttcaaatgaatttaatacaaaactaggatgagggttggaatgcaaggaggaattaaaatatgcatgttttaattatagtttaccaatatgaagtgattcctgtgagattcagttgttggacagatcagaagttatacagaaaaagatcaataattcagagactgaagtgtttcagttttcattaaacagaaagaccagaaagaagttaaagaggagacatgttcaagttcaattaaaccaaattttatgaagcttatgattcatccaacataccgccatgtgtctgcccatagtcccctctccttctagatcatttgctgaaatgacatctcagacacaatcatttgcttcattgtaactaaatacctctttacttcactgctatttataaggtcccttttggattttgtttattaataatcatctagaattcaaataaatgcatatgccactcttgccactcctcttcagcatagtactagaagtcctagccagagcagtcagacaagagaaagaaataaagggcatccaaatcggtaaagaggaagtcaaactgtcagtgtttgccgactatatgatcatttaccttcaaaaccctaaggattcctccagaaagtttctagaactgataaaataattcagcaacatttccagatacaagattaatgtacaaaaatcagtagctcttctgtataccaacaacgaccaagcagagaatcaaattaagaactcaaccccttttacaatagctgcaaaaaataaaataaaataacaacaacaacaacaaaaaacttaggaatatacctaaccaaggagtcgaaagacctctccaaggaaaactaccaaacactgctgaaagaaatcatagatgacacaaacaaatgaaaacacatcccatagtcgtggatgggtacaatcagtattgtgaaaatgaccatactgccaaaggcaatctacaaattcagtgcaatccccatcaaaataacagcatcattcttcacagaattagaaaaaaaattctaaaattaatatggaaccaaaaaggagcctgcacagccaaagcaagactaagcaaaaagaacaaatctggaggcatcacactacctgatttcaaactatactataaggccatagtcaccaaaacagcatggtactggtataaatataggcacatagaccaacagaacagaatagagaacccagaaataaaccaaaatacttacacaaactgatcttcaacaaagcaaacaaaaacatacagtaaagaaaggacacccttttcatcaaatggtgctgggataattggctagccacatgtgggagactgaaattggctcctcatctctcacattatacaaaaaccaactaaagatggtttaaagacttaaacctaagacctgaaactataaaaattctagaagataacattggaaaaaactttctagacattggcttaggcaaggatttcatgaccaggaacccaaaagcaaatgtaataaaaacaaagataaatagctggtacctaatttaaattaaaaagcttttgcacagcaaaaggaacaatcagcacagcaaacaggcaacccatggagtgggataaaatcttcacaatctatacatctgacaaaggactaatatccagaatctacaacaaactcaaatcagtaagaaaaatacaatcccatcaaaaagtgggctaaggacatgaatagacagttctcaaaaggagatatacaaatggtcaacaaacttatgaaaaaatgctaacattatgaatgatcagggaaatgcaaatcaaaaccaccatgtgataccaccttactcttgcaagaatgaccataatcaaaaaaattttaaaaagtacatgtttgcgtggatgtggtgatcaggtaacacttctacactgctgatggggatttaaacaagtacagccactatggaaaagagtgtggagattccttaactaaaagtagaactaccactcgatccagcaatcccattactgggtatctacccagaggaaaaaaagtcattattcaaaaaagatacttgcacatgcatgtttatagcagcacagttcacaccagcacaatcgtggaaccaatccaaatgcccatcactgaatgagtggttaaagaaactgtggtgagtgtgtgtgtgtgtgtgtgtgtgtgtgtatgtatgtatgtatatatgatggaatactactcagtcataaaaatgaatgaattaacagcatttgcagtgacctgaatgagattggagactattattctaagtgaagtaactcaggaatggaaaaccaaacattgtatgttctcactgatatgtgggagataatctatgaggacacacaggcattagaatgatataatggactttgggaacttgtggggaaggttggggggagagagaaaagactacaaatagggtacagtgtatactgcttaggtgatgggtgcaccaaaatctcacaaatcaccactaaagaacttactcatgtaaccaaataccacctttacccccaataacttatggaaaaataaaaaataaatgcatcaggttaatagagaaacatattatttatgtaaattaaaacagattttaagtactacaaatatcttttaataagaaatcagaagtgctcagattaaatataatctcttaacatttttatgagttcccaaataaatgcaatataaacatattgaaaaaaattatccatttctaacatttcagcatccattgccaacacactctctaagattatcgcaaccatctgaatactacattaaatacatgcaaaatactttcctatattcttctcatttagtgtagaaggaattggtatattgaaatgacattcatatcccagcaattaaaataatatgatttagataatgttatttgatgtggtgatataaaccaggactttgcagtgtgatttcatgtatttagaaacattattagccattatctgtttaaatatggcttctgccacattctgggatgcatatatattagaccgttttactgtgttctctatctttttgtgtctccatgcttcattccaggtatttccttctgaatcttaagatttagtaattttctatttacccctgtcaaatttgctgttaaacccatgcacttaattcttatttttcacttactgtatttttaattctagaatttcttttggattatccctaaaatatgttatgtcctttttatggtttacagttctctgcagcgttctcaatcttgtgtctaatctctttcaatatagtccatgtggctgcttaagtcacatttcatatatatacatatacacatacatactttaaaacgtataaacttgtttgtatatacatactgtatatctctatataatactttccctaatataattatacatataaaagtatatacatacacatatgcctctttaatagcctgttttctcaattgcaattgggattaacaatgtatatgtctcacaggtttattataagaattaagaatgataatatttatggggttattactagagttcttgatacatatactaagcatgcgtacatgggtgttctttcagtaaaattagacatgacatgatataatttaaaaatcaaggtcttcggataatgatactattttttttccaaggcaaatgataacactgagagagagtagcctttcagtatcagatacaattggaccctgctcggtttctgcaaataccatctgtatcaccttgggcaatttacttagcttctctgtttttctgtttcctgcccttatctgtttttctgtttcctgaccttataaaacgaattgaacaatatagattttacaggctgatttgtgaatttaatgtaatatgtgtaaggtccctggcatattacacatgtagcaggaatgtatcttcataatcatattaaatatatttttcagattttctaattttgttaatatttgaaactagtaatataattgagtttgctgacaatttaggaaaacatggcaaagtgtgaaacaattaagtgattctcattcttttttcccttttgataaagtttttgacactttgccaccaatgcgctatcaggagaccatgagtgccatcaggacatgggtccagcagtcagaaaccaaactctccatacctcaacttagtgtcaccgactatgaaatcatggagcagagactcggggaattgcaggtctgtgaatatttgaatgtcaaaacaataaagcacgcttatcaagcattcacattgatataacctttaaataatattagaatttaagtcattctgacaagtatggtagtttgcccattgagcaaatgaaaatgagactttacagtattatttatgcatatactctatctatggatatatatgtatgggcatatatacatgctgtttttgaaaacaattgtatgatctatttatgaagtatatttttaatttagcatgcattttcagatgtattgattttgattattagaaaaaccattgttttattccccacctttgcttctttatttgtaactcctgtcacattctcaaactggtgggtaaaatcagtgtacagtcatcccttcgtatccatggggaagtggttccaggaactcctatgaatatcagaattcacagatgttcaagtcctttatatgaatggtgtaatatttgcatataacttatgaacatgctcccatatactttaactcatctctggattacttataatgcctaatacaatgtaaatattatgaaaatatgtgttatactgtattatttaggaagtagtgacaatgaaaaagtcttacatgtttagtacagatgtagttatttttgtcaaatattatctattagtagttgactgaatccactcattcagaatccacaaatatggagggctggctatatttataaaattggtttaaatttaaacattaattttctgtaatgtaatgagacatttgaattctaatagctacatttttttaacatccttctatcaggaaagatatactaatatgggaaatgaaagaaataatttgtaagagattttataatacttttcctactttattttatttttagacggagtttcattcttgttgcccaggctggagtgcagcagtgctatctcggctcactgcaacctacgcctcccgggttcaagtgattctcctgccttagcctcctgagtagctgggattatagtgcgtgccatcacgcctggctaatttttgtatttttaaagtaaagatggggtttcaccatcttggccatgctggtctcaaactcctgacctcagatgatctgcctgcctcagcctcccaaagtgctgggattacaggtgtgagccactgcgcccagcccttttcctacttattataaaatactacattatatgttcaataactttttatttctgaagacatgaaaacgtattagttatatttagaagctgagataatatgtgcattttaagaaaaatgtttaaaaattcaaatttaaactttatcacatagaattttttttggataattaaatatttttttgaagtaatgtattcaaagaaaaatacatttaaacaactttcattatgtattgtcctatttagatatttattctactacaataccaaatggtagctgtttcaccttttttgtttccttttgttgtggtttttaatgcttggcataatgattccaaagtctatctggaaaaatgtgttgcctaatagaactagtaaacttttaaacataagaataaaaatgtgcaagaataagagtggagaaaacacaagaaaaggcagttagatgagcagaagagactatttccactgaaaaagataggaaagaaaataattgttcataaatattattgggaaatgtattaactaactaaaaaaaaagatatgaacatttcccccaaagttacaccaaaataaaaaccacatacaataaaatgttcaaaaaatgtggggaagcccaaattttggaaaatatttaaaataataatgttataaaaatttaggtggagaagcataaaaatcgatggaaacaatcacaaacattgtaaaaacaccagagacaattttaaagaaatatgataccaaggaatctttttttttctgtgagtaaggaagaaagtcttgagtaaggtatcctccaaaaagagacatatatgaataataaacctatgaataattgtaacttaaattgtaaaggaagaagtaaaaaaattacaagatgagaattttttttgcatactaaattgcatacacacaaaagatataagtaccaatttgcaagtggtgaaataaaaattgtctcttactgctggaaatgtaaattcaatatgaattttactgaggttaactcttcagtgcatcctaataacatacaacattaatataatttccatgaaatctgtatctgatggaaataatcagaatacactcaaagatgtaaatggaactggagatagataggatattgattgattgagggatggatggatggattagataggtaggtagatagagataaacataatttacaggagtggaaaactagaaatgaatgtgtagaactaataatggaaattgttgaactagaaaagccattacaatttttgtttttgaaaaaataattatttgacatgggcaaatgctcacactaaaacacctagctcaaagtgtagttatatgctagatattgtctaaataatcagtcataggggaacaatttgaaaaagtgaaataaacttaaaaaagtaaagtaaaaaaacaaattaagtaccaccaaataggcataggatactatgaaactataaaacttagatatttgacaaattttgggttgatataggtcacattataggggaaagaataactgtttatatgtgcatacatgatcatatatttaatatttagctatacatagaacaaattgaaaatttatataaagtactagtagttctggtttttttttccatttttgtcatgagcctttattattttataaagtaaaagtaacattaaagtaaatattgaacaggggaagtctaaagttatgatcctactgtaagaaattacatgtgttatacagaataagtataaataaattttataaattctccacaaaactatccttgaatcccaccataatactacataacagaataacattttttgaaaatatattaagtacatagattgttcaataagtttttctattccatatatcaatattattagctatagttttatgtagagtttactttcctgaaagctcagtataattaatttcaactccattaactgtatcacaaatgcagttattaatatatatacttaattcagtaaaattagatgcaccaaaactttttggctctgtaagatatagttttgagatatatttgacattgttcagaaaaatacatatggagtgttaaataccactaaataatattcaagttactcttaggataatatgtaaaatttaaattaccactagaagtttataactgatagaagatcatctactttgtttacatgtttgaatcatatagatttcaagtacagttaatttcactaaaactcatcaattattattcatcaattagggtaaatgtatttaaaaaattgttttttaggctttacaaagttctctgcaagagcaacaaagtggcctatactatctcagcaccactgtgaaagagatgtcgaagaaagcgccctctgaaattagccggaaatatcaatcagaatttgaagaaattgagggacgctggaagaagctctcctcccagctggttgagcattgtcaaaagctagaggagcaaatgaataaactccgaaaaattcaggtaattcaagattttactttctaccctcatttttatttacttgttttttccctaacgatacactgtaaactgtaaaggtacataagcatttgaccttcagcatctttcaaagttagtgagaagatgaaaagacatgagtcttttacaaaggatggcgatttgcttattccttctaggaaaagaataggagttttctcagtgtttttagaatgaattttctattttcaccattaccaataggaattaaacatgtttttagtttaataattttcaaaaccaatcatccatttagtctggttgtcttttaagatacgggtaatcatttagcttatgactagaaaaaagttatgtatatatacattatacagaggtatattgtaatcattttatatatataatgtatagtatgtatatgattatttcctatattacctttcatttctgctgttttgctacttataaaaagtaggagtcaactatgctgtctatatgtgctattatatataaaatatggtgatatgttcataaaattgcattatatattcatcccattatgtataactccatatatgtatatgtgcagtagaaatgtaggtgtattaatgtcctatgatactcctaagaaattagcagaaatttaatggcttcaaacaacacaaatttattacattactgttctggaggtcagaagttcagaattaatctctgtgggctaaaattaaggtgttagcagaactgtgtctgttttggagactttgaaagagaatgtgtgttattggcatttttagcttccatatatatatgtatatatatacacacacatacatataacatgtatatatgtgtgtatatatatatatatatacgtgtataatggaattatatatcatgtacatatatacatatctaatgtaatatatatcacatatgtaacctgttgtatatgtatattaatgttacatatgtaatatatagtaataacttattttatcaccatatcgaatttgtaattatatgcttaaattttaccacatcaccttcttcctgaaaccaaattcccttgacttaatttgtttgaatagtgccaccatactaataaccactcaagctaaagaaaaacagtaaaccaacaattgcattaaggtctaaaagcctaaaatattcaataaggtaagtaatgtgtcccttgagtggtcaattattgtgacaaatgttaatgctgggaaggaaatgtcgaaaacgttatggtatgatggaaaaacattgcaacaatatgctcctggatttaaatcccagtctagctgcttagtttttgtgcttaccttttacaaaccaaagcactaagcaaacctaaaacattttttaatgcatagcatttctttacttataaacatatgtgtacatgcatacctatgtaaatactgcatgaaaatatctattatttgtcaagaccagtggcctaagagggcacaattacatggctcttgttatcaaggagcccacattctagtgaaggaggaaggtaggtgtattcatttcctatggcactcctaacaaattgccggaaatttaataacttcaagcaacacaaatttattagagttctggaagtcaaaagttcaggattagtctcagtgggctaaaattaaggtgtcagcaggactttgtctgttttggaggctttgcgacagagtctgttttattggcatttttagcttctagaagcattccttgtctcatgtccccatcctccatcttcaaagtcagcagtgtaacatcatctagtgtcaatttctctctccctgtctatctccctctccctctctttctacctctccttctcaccttcctttccctatcctgttccctgtgttgacttccttttaattaggacctttgtgattacattatgccctggtggatgatccagtataatctccccatctcagaatccttaatgtaatcacatctgcaaagtcctttctggtaatatactcacaggtttcagagattagggtgaggacatcttgggggtagcattattcagccttgcatggtaaataaattaaacagtatgggaaaggttgtcacagtaggcaggaaggaaatccaacataaactaggaaaaaggattatgaaatattatcggaacataggttgtctctgctatagattaaataggtagaatttagttagctaataccgagaaagaaagagttcttgagaaagcatagcagcattttcagttaaatgatataagttcaacactgggtagacaatatatatggggattaataaaatattatggttggaaaactggattgagagtagacagtgaatgtccttggatgctatgttttacaatctgagttttaatctagtggtgatgggactgataataataacaataaaaacttaataagaaaaaactgctattggttaaagagggaaataatatgattccacttgtgttttcaaaacattcccaagatgagaggaaggaggagaggagattactggcatcactgtagatcagtaattagaatgaggtgagaccgaggcagatatcaaaacgagccagtgcattaatggagtcactaatgagacctgaacagcccaggcgtagtggctcatgcctataatcccagcactctgggcagctgaggcaggtagatcacgaggtcaagagatcaagaccatgctggccaacatggcgaaaccctgtctctactaaaaacacaaaaattagctgggcatggtagtgcacgcctgtaatcccagctacttgggaggctgaggcaggagaatggcgtgaacctgggaggtggaggctgcagtgagccaagattgtgccacttcactccagcctgggcgacagagcaagactccatctcaaaaaaaaaaaaaaaaaaaaacaaaaaacaaacaaaaaaaaaaagacctgaacaaggacagtgaagatgtgaaataagaacaaatgtagacttgaaagataacagcaaggtgatcgtcttgaagttctcttagataaatagtttaaaaattattattaataatcacattaaaggggaaactttctgtggagcacatattttcaatgtaaatttaagtaaaacagaagaaaataacacatgtagacagcatagttgaatcatactttttagaagtggcaaaacagcagaaaaaaaggtaatacgggaaagaatcatgggtgagagatactggctatttataaatgataaaagatgatgatttttacctgatcattacttcgtactggtcagacaaataaaagcaaaagctctgtctttgaagatgacaaaatattagtccaaaagttcccaactggaaggactatttaaactgtcatctgtagaaaataatttgtgaaagttcgggtttagggaggctataaagacaccattacattgagtttattgttcatagtttgttttatgtactgtaaggacacatttttagtattctcatgagttgttttgtaacttaaaatttctctagagggggatatgatttaatgttctcgagagtaacatcataaaaccacatttggtagtaattttgtatttttaacaatagcagacttcacacaccagtgctcatacagtagaccataaaaatgcagtcttagtaaaaatattctttgcctcaagaactacttagagacatcctttaaacatgggaattgtttttgggcctgtgtttagacataacacaatgatgaattgtgttaaaagtaatcagcacaccagtaatgccttataacgggtctcgtttcagaatcacatacaaaccctgaagaaatggatggctgaagttgatgtttttctgaaggaggaatggcctgcccttggggattcagaaattctaaaaaagcagctgaaacagtgcagagtaagatttttatatgatgcctttaatatgaataattttgtatgaatattatttggttagatcagtgttttacagctggggtggattttgctctcctctccccagtggattttttttaatgtttctagacgtttttgattgtcacagctgggttgggggtggtggttagatgctactggtgtctaataggtagaggagagagatgctgctaaatatcgtacagtccatagaacattcctccagaacaaggaactgcacaatctaaaatgtcactagtgccaatgttgagaaaccctgggttgagtaaatgaggaactgacaaaacattgccttgtactcaacctcatttgataacattattttactataaaatgcagtataatttaaaggtaaagaatcctttgagctacttgttatttcttatgataaattactattcatactgtgttgttctcttcatctataatgcactgtactataatataacacagtatgcattttgaaataatattcattataccattgtcatgcagcaggaagaaaacaatcttgctctttaaggaaatttttttacaatacaagctaaaaaagcaaatccacctcacaaataaccttcacacccattacactgtaaacaatttctgcagtatcctgtgtttgaaaatgaaaatactaacaaagataataaagtatgaagcccatcattttcacacatttttctaaccagaaatattaaatttatttccttttgtttctgatataagtagaatacaaataattccccactggattcatgccataataaccattgaacatttttgcaagactgttaggcagtcatctatatcaatatctctgtatctcagattttaaaagacaaaaatccatatgcaatgccatcagtcccaattttacattttctagctatgtttcatatctaatatgtggcagtaatttttttcagctggcttaaattgatttattttcttagcttttagtcagtgatattcagacaattcagcccagtctaaacagtgtcaatgaaggtgggcagaagataaagaatgaagcagagccagagtttgcttcgagacttgagacagaactcaaagaacttaacactcagtgggatcacatgtgccaacaggtatagacaatctctttcactgtggcttgcctcaacgtacttaactaagatttcctaatgtctcccttcaccgttacttttggttaaggctttgttcctatgtttttgctttaaagcacaattaattctgacaaattaatcttttttctagcatatctaaatattttcatggtatatattttaaatagtacacattcatcttattttgatcctaaaatgactttcttgaacacaactgtcatactaaaaaatgaaatcctattcttagtcattatttccaatccatgttttcttcagaacataaatgtataataataatgggattaagaaaaatttgttacacggagatatttggtacaaaataaaatgcatggctaatatatgtgtatgtagaaataggataaataattataactttcgattaacatttccaagtttggcctcttcgacacatttattatttatttattttattttttgggacagggtctccctctgtcacccaggctggagtgcagtggtgtgaactcggctcactgcagcctcaacctcctgggctcaagcaattctcccatctcagtccccacaagtagctagaagtacaggtgtgtgccaccatgcctggctaattttttgttattttttggtagagacagggtcttgctgtgtttcccaggctggttttgaattcctgggctcaaacaatgctctttccttggcctcccaaaatgctggaattataggtgtgagttaccacacctggctgacatctagttttaaataacaattaagattcagtaaccattaagaatagctgaatttcaaaaaaaaacacacacaaaatgactgtacactcatatttgagtttctcatttttctacagaagaatattttatagatatctctcttatatttaaatattcaattacggatagtaagatatattcaaaaatagtgtatatcaaatacttcttgttcgaaagataaaattttgaactaaagcaatgaatacttttaagttcaccaatacattagtccccgatcatctgcagttttgctttccctggtttcaaatgcttgtggtcaattggaatcctaaaatcggtgagcacagtaaaataagatattttgagagggagaagaagagagataacttgttctattttattagttgttaatctcttactatgcctaatttataaattaaattttataggtatgtatgagtaggaaaaaatctagtgtatatagggttaggtatcatctatggtttcaggcatctattggaggtcttggtatgaacatatcttccaaagatacaagggaactactgtacctttttggaaattaataaggggtttcaatttacgtgttagaggcagttggtctttggttactgctaagtaaactttcaaaatagaaaagaagtaatgtcaaaaggcaaaagctacatttgaaaatgaaaaaaaaaattagaaaagtcaagggaaatcactcagctaatacaatcactgacaagtgttcattggttctgttaattcacagatgagctgtccctgggtcagctagctcacattcttctcctgaagtaagtcagtgctagaagagttgtttaggaaaaaaaaaaaatattacttaaataatagattataccattgatgttttcctggaaggccagtgtgaaaggtatttgttttttgtttgttgaatgttcttaatggatgaataaaaagaacatcaccaatttatgtagagcaaggggaaaacatcagccaaaaaaaaaaagtataaaaccaacaatattactaaaacctcaaggtttttacattttacaggagtacaatttgtaaaggctctctaaaaatgtctttgcttaagaccttatgtctgttatatgtactaagaatttgttgttcaagagatatattttaaacacactcatctgttgcatagcaaaaaagctatagatccaagctatgttctgatctccattttctaatcttagaatattatatgtatctgtgcttttcctacaagtatcactctggccatgttctgactttgtagccaaatgagttaggttgtaaaaggaaggaacaatggcgctcaaggagaagaagaagacgatgcggtaaaaacaaggaagccatatgtgaatattgttaccaattcagcattccagagagaataatggaaatgaagtgtaaatctatgcattacagaaatatctacagacaaaataagtgtgtgatacactcttttgggttaaagataattccttttttgtcaccagatgccaatgtctgcgaaaacataaataatttgaaacaaaattgtccaaatatctgatacatttgaagatgctttcacatcccatgatctaattttgggtatataaaatggttattattttaaattttaaagggtatgtatataagtttaaaaatctagattctagctatttctaaaaaaatgatcagatataagtgagggaataaaatagacattgtagttaccttcacggagataatagtttagtggtgaaaatggaaagtaaataggttaacacattatcacaacaatgtcttgtttgaagtcttgcttacactctgaatgtagcaataagaaccctttaaatgagagtgacaggagcaggaaaactactttctattgggtagtcagtagagtgttttctgaagaggcgaaattaaagctgatacccgagtagtaggaacttgacaatttgttgtgtcaaggaattctgccagaaaatgaagtggagaaaacatctgaggcaagagagggcttagcatgtttgaggagctcaaaggaagccaggagaaaaagagtgggaaaatgagtcagaaaggaatatggaagccacagtgatgatttagtcattatgtcaagtactttggaaagtcatctgacttttaagcataggagtggcatcatttcatttcatttaaaatggttgttttaagtttgctgcatattcctattagaagaagaataaatcaaaagggctgaagtggaagcaggtagggattgcaattgtccaggtagaaaaaaaaaacaggcaggaaaaaggggatatttgtggatattgtagttttctgaggaacctccatgctgttctctacagtgactgtaccatttatattcccactaacagtgtagtgtagttcctttttatctgcatccgtgccaacaattattttttgtctttttggcaatatacatcctagctggggtgaggtgatacctcattgtggttttggtttgcatttatttgatgattaccgatgtggaatttttttttcatatattaattggccatttttttcttcttttggaaataactgttcagattatttgcccatttttgaatcccatcacatccacatatgatatgatgttttatatcataaaatcgttatttttctttttatgatatctgagtttctagcttctgcacagcaaaggaaacagtaaacagaatgaaaagacaatccacagaatgggaaaaaatatttgcaaactactcatccaacagaggattagtatcctcattacatttttgatgaggactttcacacttacatctacccagaagtattattcctatcctaacatgacacattcctttattctttttaacagatcccattagatctggcagtacttgctgaaggagagtgtttgttgatagtctagaggaagaatgagggaagaatcaaagtgttttcagatatatttctgttatgagctacattgtaggtcattgtgattttaaagaaagagtgggtactaagagaagaacaaaatggaatagcttactagagtgactagcggttccatcttagccatatttatttcggagaaaaagacaatcagacatgtatctggaagtcaagtacacttttcaaactgggcatataaacgaggtacataaaaataaagataacatgtatataagatactgtttcttgcctattgagaagatttccccatgctcccatccctaaaatgcttggtcaaattggataattcgtaaactcttagagatggaagagaatctatttttgtttaaaccactttgttgaggtatgactgacataccaaaagctgtacatatttaatttatacaacttgattagtttggggataagcgtatacccatgagacttattaccacattcaagatgataaacttacctatcacctccaaaagtttccttctgccccttaatttatttattttttttgttttgtgataagagctcctaagatctatcctcttggaatatttttaacaatacagtatttttaactataggcccaatgttgtacagtagatctgcagagctaattcatcttgcataactgaagctttgtatcctttgggcatcattttgccattttcccctctctcagcctttggaaaccactattctactctctagttctgtgagtttgactattttagattctagggaatggaaggaaatattcacaaatcatatgtctggcaaatgattaatatccaaaatatataaggaacttctaaaattcaatagcaaaaataaaactgaaaaataacctgattaaaaatgagcacaggacttgaatagtcatttctctaaagaatacgtagaaatgaccaacaggtatatgaaaaggtgcatcactaatcatctgaaaaatgcagttaaaagccacaagaacctcttcatacctgttagggtggctattatcagaacaaaacaaagcaaaagatactaagtgttggcaagaatgtggagaaaagggaattcttttatggtgttggttggaatgtaaattggtgcagccatttgggagaacagtttggaggttcctcaaaaaattacaaatagaattcccatttgattcaccaatcccgcttctggatatatatccaaaggaaataaaatcaggatctcaaggaggtatctgcacccctatgtttacagcagcaatatttacaatagccaagacatggaaacaatctaaatgtatattgtcaaataaataaaacatggtatatgcatataacggaatattatgtagctttaaaaaagaaaattcttccatttgcagcagcatagatgaacttggaggatagtatgctaagtgaaataaaccagacacacgcggtcaaatactggagaatattttttttgtggatggaaaggcacagtgtgtaagaccagaagctctgagatcagatcgcctgggtttaagtctatccacatcataaactgcctgtgtgattctagaaaagttgtttaacctttttgtgcttgagtctcccaatctttaaaatgtgatgatattaatacataattcataagtatataataattaaatgaattcatcttttcaaggtgtatagagcctcatctaacctagattaatcactgtacatgtttgttagatagaaaacaaatagaaacctacatatatagaattataaaacatgtatactttctaagtaaataatatatggttatatattttaattattagtggctttaaatttatagtaaatagttatcaataaatgggatttagaggttacgtggatgtctttctgccagcttgcagatcattgtctttctctgggtcagtatactctttgggtgtagtgatccccagatctctttcgtcagatctctaacagtctgtttttccatctttctgcaaaaaactagcttcttgttttaccgagaaaatataagcaatcagaatagaagttgcagtactcccactgacctgcatataagctcacagactctactttccctttgtttacatagatgaactttctgtgcttttgtctaaggccagcttttccacttacgtacctggatccctttcccttgtctctgcacaaggacattgtaacagctaatgaacagccctctacctcctacatcttctccacgctacatcattcccatcattcccatcagtagagaattattctgtaatatctcctgtcatttaaaagaatcctcaattggacaacaatctctctagcaacctctccattcccgtttccctttacagacattcctttctctccatttcactccttcccttctctcttgatgccaattaagagagctaatcaaactgttatcctcactattctattaaagcagattttgtcagggtcatcagtgaattcgtattactaaatcgctaaattcagttggcttctgtgtcatcattctttcttaattatctcttagttttccctgaccactgtcaatatccttggtggttctattgccctgaccactaaatttgaaagtgttccagggctcagtctgtggactccttttttttttccccctattaccacccactctccgggtcaacttatcaagctccatagttttaaatgtaatctgtaagttgttcctgctgtaagttttttttttttttttttttaacaatctggaccctttctaatgatcctagacctgcatacccatttgcccactcaacacctccacatcaattaataataggcatattaaatctaacatgttaaaacaaaattcctgatgtataccccagtctactaccctagaaatttgcctgttattacaaatggcacctccatctttccacttattcaagccaaatcccacgagattttcttgtctcctatatttctcttacagccgaacatcaaatctatcaccaaatgctgtcgtttttgccttcaaaatttccaggatccaacaatatctcaccatacttgagcacgtgcacacacacacacacatacacacacacacacacacacacacacacacacacacacaaagtatgtatgtgaatgtatagtttttactagaagtcttggctgaattccattagtccctctaatatttttgtagcttcaccaactgccttaaaagattataacagagcagagtttctaagtagaaatttagcagcaggatttcttaatttataaaatagcaaaaatagcagcatgttttcttaagtttattataggttcattgactgcacaaaataacatttataccttttctagtacaattgcaagacatattgttctagatgtgttagggtgaaacatttatttacattgtagtagatcaagtactacatttacctaggtaagtaaagaacctaaaatgaagtattatctatattaggctcaaaatggttgtaaattataaggaaaatcaatgcgatagtgattctacacatatttactattgggcaaagtaccatgaacacttcattttactaaaactgtgcattatatattaatactatgaaaactctgttacttaaaatgtataatgttgtttcaaccagagagaagaataccatcttttgaatagagttactttttaaagtaaaagcactatgtataatgattgtaatactatagagtgccttgtaacaaggtgtatgattttcttttagatgttttaagttttgcatttttctggttaatgagtaatggagtccattgtagaaagttttagttttcaaaaatgcgtgaggctttaaatagcagatgttttctataaccacagacagactcttttgcaacttgcattttacacgtaaaactttatattgagccacttttcatttcagtaaagatgtatttgtgatgcacagtatcccatagtatatatatgtcataatttaatctctcatgaaagcacctttgggtttgttttcaagatgtttggtctttaaagctgaattaaatattgtacatgttagtctctacactttggttggcatgattcactctcaaaaaatggagcagttgactcagattcgtggacattaacatttttatatgttttgccatcttactatctaaaaggttgtattatgttggatatttccctcaacaagtataaaaactttgattttcccacatccctgcccaaaatgggctctttattaattattatttttccctgtcttaacatgtgaaaatgcattaattcacttcgatttgcaatcatttaactataaatggtattagaacatcttttatatacatgtattgccatatattatcttctttgtgaattgccaaactacgttttatgcacttttcgttttttctttttaatttatgagagtttctgtagatacatgattatgaagttcttagaatatttaaaatagtaaaacattatgaaagaacacaaagaataactatttctatgtatgccaataaaattacttttccaactgaaacatattattttaaaaagccttgtttttctccattcacagaaaagcattgtcacacaaacagctgaattatcatcatcgggcaatacgttcattttattaagtatgccaaataaacagacatgtcttattttcacacttatgggaaattgagtgtatctgatccccatgagttattttcttatgcatataagctttttacttctttatcattactatctaagctttctgttatttacatactgatgaaataatataataataatgtttcatcactgtcaataatcgtgttttgtttgtttgttttgtggaaggtctatgccagaaaggaggccttgaagggaggtttggagaaaactgtaagcctccagaaagatctatcagagatgcacgaatggatgacacaagctgaagaagagtatcttgagagagattttgaatataaaactccagatgaattacagaaagcagttgaagagatgaaggtaaaaaaaaaaaaagaaaaactaagtaaaacaaaggaaataaatggaaaaagaaagaaatgcaacaatgcttgaagttgtatacagtctgctctttcctggttctaagagaagaggttgatttttaattaataattttaatttagcttcaagtttaatatacattttaacaaccttaaactgtttaattttaatgcattgtggtcaattatgaaaattgaaaatcacaatttgaaacaattttcccttgaaatcatgtagtattaagagagcagaatcaactcatttcattaactgtctgtagctgatgtaaatgtacgttgaaactgtgcaaaagtattcttgaaaagacaaatttataatgtagtcaacaaactgtgttaatttggtagtttgaaggcatttctgagaatttggaaacactaaatatttgaacccgtagcctttaatatggatagaaaggactgagtttacatgtacttttcttgaaacaataggacaaaatataacattgacttattacgaaggaaactggtatgtagtatgtagtatggatttggaggtgaagcctggacttgaacctacatagtggcatttcgtatggccttgggcaacaatataatagtcaatataatcctctgttttatcatgtttatatcatcatacttcctcacttgaatgtatgaactgttgattgtaactaccatgtgagtaaattgcctaactcagagttggtgctcaattagtagctataatcataattattatttttatgtgctagcaagaacttagagaatgacttgaaatattaatactgtagatctttttttggttcaaggattgtgacaaggaaaaatcaatgtggagccagatacttgagtttaaaacttagttcggccccatgccaactgtataaattggggtgagttacatgagcttactgagccaaattccttcgtttgtgaactgggtatcagaatgtctgctttcagaatcattagagggatgaaatatgaaatttctaacacaatgcctagcacagtataaatgaccatgactcattatttattattttaattgtgaaagggccacatggtaaaaaattatataattaaatggtaattcagaaatatctattatagttaatagcagaaagtaactcacatgaaaactcagatgtttaaatatcgaatctgtcatacggctttagtcaaatgttgaaagtaaatatctaatatactccataaatatgtataaatattatgtgtgtataaaactataatgaagaaaaaattagtataatcatttctagagtattaaaaacacagaattattctaatctagcaatagcatatttatcaactaaaacttattgcatacttactgtgtgccaaacaccctctggctactgaatatagagggtggtgagcaagaccactgccttggaatttacattctagtgttctagcgtgtggtgaggagcaggcaataaatggaaaaataaatgaaatcatgataatttgcctagaagtaaacatggattttgaaatcaagaatgaataatgttcaggcaggatttgagggtggtaggatgctattttagaaaaacttgacttatagagcatttatgaagaattgtatgtaatatgagagaactgaatcataaggaaaagccaaccacttaaaaaaatctttatggaaacacattctattcagagagcatagcttctgcaaagaccctgaagctaattgggaagagaaagaaatctgcctgaaggaaggaaaatgggataaaattacctcagataagtcttaggaggtgggcaaatatctgttaacaaacgggttttgttagagtatcacagtttttattctaaatggacaagaaaaaccattggagtatttcaaaagaccaaaataatttaaaatttgactttggggaggtcacccctgaggaaaactttatcagaatgtgagagctagaaggtactttgaaacttgtgtaattcacacttctctctctgcttatcagaaaactgcaattcccagataggtcaaatgatttagccatagtcacagactttatttgtggtagagcccacaggattgaaggtattttattctatttcatctcttttttcctttcctttcctttcctttcctttcctttcctttcctttcctttcctttcctttcctttcctttcctttcctttcctttccctttccctttccctttccctttccctttccctttcctttcccttccctttccctttccctttccctttccctttccctttccctttccctttccctttccctttcactttcactttcactttcactttcactttccctttccttttcctttcctttcttttccattgtgtgtcactcatatggccttttctcttgtatctcaattcctttctcactgcgtctatttatatatggccactacctcagatccgtaagtagatactatagagtcatttgtgttcagctgctctgattatccctgggttcctttggttcagtgcctcttctggccctcttccctctccctatgagcgatttgcctatgtcaccaacaacccagtcagatctctcttattttcctgtgctctagagtaaactgtctcaaatttttaaaatttgaaaaccatccttgaaatgagtgttccaacaaatttgtctacattgattgacatgttttgataattggtctagctacaaaattggtttagtatgggggtgatagtaaaaagaggtaaactctggaagcctctggcaacaaccactggaagagttggcaggaagatttcatttcttgagttttcagcctgctactcaagacagtttctttaaggcaacttcactacctggaggttagcaatagtaccttgtccagacttctacctgtgctcatttgatagctaatttttctttattgtcagaagatactaacagacctattttgacatctctccctgatactcaaagaagaaatagagacccccccttctgtttatgttctttcctgtgttttacctgaaaatggaagtgctgttttaataacttatttttcccctgaaaaggaaagtttttttgacataaaagaacccagggtacagtttgataaacaacctctgactttaaaacttttatggagatcagcaatcactatatggtaaaactttatactaaaaccctttgaaaaacactctggaaagttattaactggttttatttttttttaatttttactctattataactctagtactagtgcttaccagaacttacacataaagtgagaatagtaaatacacaaataaatttgtataatcactacagcagtgattcctgcatctgaatggacatcagaatcacctggaagtcttgtttaatacacagagtgctgggccctgaccccagaatttctgattcagtgagtcttgggtgaggcctgtagtttttcatttttaacaagtttgagtttgataccaaagaacaagttgcagagtgattccaagggtgctcactttaagaagcacgggtgtgaaatcctagcaatgaaagatggcagagcatatcatagttagattcatggaaagaaacaagagccaccgtttttatgaggatttgtatagaaactgtaccagtcatttagctttctaccttttctcctagtagagaaattcatcatcatcttctttcctcatatgtacctggattaataaattttgctgtttgttcttcgaacctttcccaagatctgagcctcttattaaaccaagaatatatgaagtctaaaaaccatggaaagaagtgttcttcattctacatttttatatagttgcttgggttatttataatgagcataaattgtaattttattcattagactgactacagcatgctccttcttcagctcatggaacatttgagacccgcttaacagaaactatgagaaagagaggatataactctgaggatgatttccttaaactctctgaacctcagttttctaatgtccaatatagaggtaacaaaacacatccgagaaggtttgggtaaagatctaatgaggtagcacttatgacatggctggcacagaacacagtagcacatattaaatgatgaatggtaatcaaacttgttgattatactataattactaaagtcaaaatgcaatttgtgtaaaaacaatctctatgctcagtgatgccaaaaagctgatttatttagaatattgaactaaagatttcaatcaattaaaatcggtgaagttaagcattctatagacaaaacaatttgcattttctgacataatgcatacttttaaggaattgtgggactaaatccaaaggagtagggtgattatgctgacacatacaaaggcattttatagctgaccttatccatatcctgccaataagcccttaccttaaccaccgcattgtatgcaggcccaacttctacattatagaacctgagttcctttacttgagggctttctgtggccactgaatcccacttttgcacttgtgtggtaggcttgcaagtactgggaaattaacatttccccaacagcctttaacaattagggaagatgatacagaaataataccccaatttcttcacccctgaatgggataacccgcaggcatatatttctcagggctttctaacaggattaaactctagtcattaacagtgtttgctgggattaataagtatgcccatatggatgtctcttccctttcttgtctcaattccccattcagctaccagaatttcttttacatggcacacataaataaactacttatatttgaaagctaatgtcaggtttgacccctggaggaacacagactaaagatacagtgtgtatgtgtgtgtgtttctaaaatacatgtacgcatttgaagttaaggagtgtaaatgtctcccaaccgaagaccaccaccaactctcttgtagctgaacaagttgggttcattattttttgcaatgagggagaatacacaacatggaggccagggggtgcgtgtggatgaaaaaaaaaaaaaacattgtaggatttgtgcttgtgttaggggatttgagggagggtttaaaagctttactttggattgcttgtcattagtgtgtagggatagctatatgggtatcgtatcttgtccagaaggagagaagaccagaatgaggctaaagttgcaattaataaagaaacggcgttcgttcatattaaccaggataggagagtgttgggcgttttgtggtttgggtaatgttgatgtttttgtctggattcagacatgattatggaatgatcttgtcatggtcttgatccattatggaaacaaagtggccttttccaatgttgaaattctgtgaaacagtttattttccacttgagaagaccaaggcatagctgggtgtcaggccagcttctgatatcagcagctccttttttggtttctctttctctcatgtgttttcaattctcgaacgaaactttcttttatcaaaatatgttcctaaatatagcatcaaggggacctttctatgttaagtatcctttaacttaaataatgatatttgtgatggtttcaatattattcatccaagtaatttataagtgatttcaattctagactgccaaatattttttaacctagttaatattgaaatatttgtttcttgccttttccaaacaattgtatttatatcaatgtgtatatatttgaccacaaatccatacctccatgcagactacttttcagtctattcttgttacagatctgttgtattcttataataaattatttctttaactttccaatttcaactaaacttaaatttatggaagagactggagttcatattagatttatttttgtaattctcattctaactgggatgttgtgagaaagaaattatatgattcatagaaatgcattttggatgtaaagttattttcatgctattaagagagcattctttatttttcagagagctaaagaagaggcccaacaaaaagaagcgaaagtgaaactccttactgagtctgtaaatagtgtcatagctcaagctccacctgtagcacaagaggccttaaaaaaggaacttgaaactctaaccaccaactaccagtggctctgcactaggctgaatgggaaatgcaagactttggaagtcagttgcttttcttggtctttgtcaatgatatgtcaatacatggtcatatgtgaggcatagtggttaagaacatggataccagtgcaaaacaactttggcttgaattcctcattcaggcacttataagttgtatgactttgggccatttgcttaacttgtgtaaacctgttttcaatctgtcaactagacataatacataattcataagttgttgagaaaattaaatgagctattctctttaaactacttagcctagtactcaatatatgtgagtagctatgcttctaattctcattactattattaggtcataaaatcctataaattttctccagatttatagacaatgatctttattttttcttatttttgtatgtacataaacttatttaagtatctttggggaaaagcattctgtagagaagtatgtttttactacaattgtctttagtaattgccgtgccccatagagttctttgttagacatgttacctaaccagctctatattttttgatggtttgcattatatttatgtattatcacaacttctgctttaacttttatggatgggccttactgtctagattatgcttatctgaatttagataaagaaagcaggtgcctcaaatgatggccatgtaattgcatcaaaaataagctatgacctttcttatgaaaatactgtgccaaggggcacaaaactttatccactacaaatgctgatgctgccagacattgcacatgagttggactttaagcccccttccctcacacagactgagttattttggtgaatatggttaataaagtgttcaggtacctctttacttttgaaaaacattatttagtttgcttcctatgttgagggtttgatatttaaagaaagatacgattcagatcaataataaagtacacctttaaaaatattttaaaatgtatttgtagctaaagtaccccatatattcccaatacagtattatcattttccaattgtaaaatgtgatccgagtttctccattatcagttctaagctcttctttactcatccttattcttttcttttaaatgcaattcactcctcagactcttgaaaagtgccttctatatgtcaggaaatattacagtttctgaggatataatgacgtatcttatgtatcagtgttatgtgagtgctatataaaatataacaaagaatgggaagggaagggatctgatggcactgtacatgtctcaagaaaaccacaattaattcactaacatgttacaatagggagggactttttgtacccaggaaatgctttctgacaatgtttaaataaaacacctactattactttcttatgttcttaatgtccttaaataagcatcattgttccctattattcatgttgttcatttaaatgatactccgtgattcattagaaatttatattggagtacattttccgaagggattttcttaagttttcgtattaataacaaacttttcaagaccaattattggattatttttccatttccttctcatgtataataacatttctaacattccctattcatattgaagttatcaaattattgagttccattttagtcctttttcactggtttggaatatgtactttattttatcttataaatatttctctatacctctctaacaataatatggtggaaacattagcatagtttaactctgaacctacctcttccgttttccgcgttattgttgcctcatatttcattttcaccttatttcccccaaattagtccatataattgctgttgctgctgctgttgttttaactatttcatataatatttatttagatttaccgatgctattttcccagtttttgtgatcagttttgccttttgttcttccctttgcttctgtgttcagtttctttcttgctctttccttgagtgtgagtagcaaatgtgttcagattttacatattgaaaatgcctttattttgccctgagtattggataatgatgcagttgagcaggaaattatgtaaggacaggtttttttttttcctacaacactgaaaatattatttgtcttttgaaattttttgcctttaggaaatctgctgtcaagttattgtttctttatcattttctctggtacctttaaattttctcttcgtcctgtctgctctgcagtttcaccctattttgtcttctacagtttcactcaactttgtctgtgtgtaaatttgctttcatttatactttgtcacctggtgtgttaattagaacagatacgttatttctttagtggttctgcattgtctttgtgaagattttctttttcccaatctcttcattccttcctaagggaaaactttcttagagctattaagactatccccttcttatattccagttactggtttccctttaatattttctatattcttatctctatctgctcaattttggatacttttctaaaatctgtcttccaactctcaaattctcgcttcagctgcctgtggcgtaatttatccttcaatagagaaatagtctcatctttgtctgtatatatatttatctctctacatttatgtatgtgtgtttatattttttcaaaaaacatattttccatttctcaatattttattgagttgtttcacaaatctgttctttgttatggttttcttcttttttgtgattaattctatgtattcctttaaacaacttaaacagataccatctgtttgactgaaatgtttcaacttaatgagtaataaacatgacaccgtcttatttttccaataactacacccaactctgtcaaatttcaccttctgcctggtagttggcttctttaacaatatttctctgggatctcattactttttattcacttttagttattaaaatgtactctaatttaaatttaaatatcataacttaatcaaatatttcacaagtttagattaatctgttgcttcagcaatttatacagacgcaggagtgagaataaatggtctcacagtctcctcctccatcccagtttctggatacagatctactgtcgatataagggagggtgaagagggaaaaatactctcttcatgtgaaagtcctttttttgctgctcacaactgctgttcccttttgttaaaacccacacacatctataatgcctagtctgttgtccctcttctatatattatcaccactgacctggctcgttctctatagacttgattcgctctgttgaggatccagattggccttattcatatgagctttgaaccccccaaaaaagatctcctaggcttttatagtacctcgtagtgtttaacaagaatttcaagctgacgcttgtcaacagctttacacaaactgctcttgaatattatgtctttttaaccaatgctttagtgatgccctggagtctaatttacctaccatatctcaactcagagcctatgggcactggaagtacctatactccgtacctttcaggaatgagaagtttgaaagagttgtttttgattccttcttggccataccaacagctcaacaggaaatgaataccaaccaccccttcctgaatatatccacccagtagatgagtggttttgttttagatcctgtaaataaaatgattcagatgagtttaccctacctatccccataaaagggtgagaaagaagaattgcctaactattcaaactctcttcacctcactcccctcaagtctccgtcagctctctctgtttaaaccagggcttgtgaaaacaagaaagagatgatctcccaaaatgaaatgtaggcaaccaagccctttttcttaggtgtgaattccacttgccagtctcaagcaaataaactctatgggaaacatacaccatgaggctaggcatatttattgtacagttctccaaaattgttctattatctttatgtcataaggtatggattctaccatttgttacaactaatgactccctctaatggaagtgaatttccccatgtggctagtaaggtttttgtttgtttatttgtttatttgcgagctcatctataataggaattgcctttactggaatttttgtctttttttttctctgggctattgagtttttgtattgttgccatcaggattgtagagattttatgctctgccctcatgtgtgatacaagcttaagtttccgtttgttatgggtggatctttatttttcagcccaaaatcccccaacaatagtttccttgctaaatcataatattccaatggctagggatgttctacttcttccttacagggtggatggcacactgcttcattctttcccatttccctggcttgcctcatttcccatctcaagttagtgttaaatgccccagctttgatgtcgtataccctgttctgatacgccagtatttttataagcttgattttccactttctactttcatttccctctttttctttctcacacctgaggttctatatacatgttttacagatcagctatgaattaaaaatgtttcctttgtattttaacatgtattttggtataactgaagcaggatatgttgggagttacctcatcagctccatctactattttgaacagaagtttagttttttatttgtactttccttcaaagccactttggattctgtgatttcaaagtaattttaagatccaaactgttaagcttaacagttattctaagtggcttttagctccaattcgggcttcaagactatattttattttgcaaaggtgacctgtaaagctggtacattcagcctctccagctgtgtccttcagatgcattgaggacagaagaagctatccattctgacagttaaatcagcaaggtagttcattacctcaatctgcaccaaagttaataagacacattaccaatcacgtctccttgtcttcaaagctctaaggtaccctcgggtatttaagaagatatttatattttcccactgggatctttgcccagaatgaagacagcctgtagtccagcaggagctggaaatgacccagattttagatttctatcaccttttaaagcaaaacacttaatttcactttttgcaataaactgtacataagatatcaagcaggtatgaaaggttggtacgtttgccaagcaggtgagactgatacttttcatcagatagagatcgaatactctgtgtcattctaagggctatgaacatagagaactttgggaaatctgattaattttttagatccttctgaaataaatcttcctttcaagcctttaattttggtggtagtgaggcgggggcaggtggtagtaagtggtgatgattgctgcattgtgtttactgtacttataggttcattcaacagttacaaagctaacagaaaatgaccgttgttacattcttatcctctctcgcatcttcctatcttttccccaatagacataatcaccatctagaaagctacctttgttattcctttgtttaaaaaaaatccacacacatatgagtgaaaaaacaattgtgcttaatttcagtattacagtaatggtaaactataatatagtttttttagggctttgtctttcacccaacatatttgtgtctgagattcattcttatggttctttttgatgagatttttcattgtcacgtctgtattctctgtttaaagatgacggtatatttttccattctccttgcagtggacattatttccttttttttgattactacaaaaagggctgaaatgatcattgttgtaacagtcttgttatccatgttaaacagtttctctgaggatgcacatatcaaaaagtggagttgttgtcttgatgggtatgtgaatgttcaccttattgagaataacaaattgttttctgaaatggccatttcagtacacacacccaccaacaataaatacaaatttttgttcatgtatatcttctctcacacgtggaattgtcaaacttctcatttgtgtcaatcaacatggtatctcattgtaatcctggcctacatgtccttgattactaatgagattgaacatatcttcatgtttaatgtatatacatatttctctttaagattttggttcaggttttcttttcattatcgattgggttattcatcttctatttgacttgctggcatttttcatattcttatgtgttacagatgttgcagttgttttcttctattttgagtctgtttttcaattacttgatggtgtcctttgatgaatagaaggtcctaattttaatgtagtcgaatgtattcatctcttttttcttacggtcagttttttacgagatgtcttacttaagatattcttctctatgccaaagtcagaaatattttcttctatattttcttgtagaaattttaaagttctgcttttttatgagtacttctgtgtataaatcagtttcataatacaaattaatggccatttaaaataatcaaacctttgaattagtggtaatatttccgataatatacctcaaggaaataataagaatgtggaaaaatagtccatattcacgatgatgtttaccataaatttataatagcaaacaaaactaaaagtagtctatctaaaaaaaggaaattgctaaactaagatagagccactttaaagaagtcttagattttcattaaaaatatgtcttcttagtaatacagaaaatggtatgatataatgtttagtgaaaagagagctatagttaaactcacttaaattttaactatcaaattatatatgataaatttcagaggaggtcacagaatactggtaacagtgatgtgtgagggagttagatttacatatgcatttttacatatgcttttatttttctgtttcccagactgcaatgttggtgcttatttttattttaaaaagtaaattactgtcttttgaatttattcattattcatgtaataaaatgttttcttaatgacttttgattgtagaggtattagatgatgaaactgtctagctgcattttgaattacctgctacaaagtaaaggtgaaaaatacaaagtgttatattttcagaagttttaataatgaaatggcaaaatttcacatttacttttctaccataatatttaatctgtgatatatatttctttcttaggaagtttgggcatgttggcatgagttattgtcatacttggagaaagcaaacaagtggctaaatgaagtagaatttaaacttaaaaccactgaaaacattcctggcggagctgaggaaatctctgaggtgctagatgtaagttgtaaattaagccaaatgatgataatttatatgcagtattaaaagaggtcaagtaccaaatagaagacaaatccaaagaaaacaacccaagagagtataattactatgttatcactcagcactggtactttggataaagcctttgttccccctaataaccttctaggtcacaagattttgcaaagggtttaaatggcttctcacagaggaaatttgcctttattatatcactaagttctacatagatgcttcacctaattaaatgtaccacaaacctgcaaagacagtgtgaataaacaaactcactgctttagggctaatcgggatgataatatgaaatattatttccagtttaaaagctgcacgtattgaattggaacctattttatacttacttaaaatcacaaatttacaccttacggaatgttttgagttattaaatggatatgctttaatattggaaatatatctttaaagtattcataaaatgtaagtacatttttaagttttactttggagactttcaataattaaatgagtttgcatttataaacttgactttaacttctgacatttaatcattcaagctctatgcattttagtgtacttttgacttatctatatgtaatgaatatgttgttttagaatatgtaatatatgtacgtaaagctataagtagtatagcccctctgtaaatctataaaataaggagcataaattattcaagatgtgaagaaaatgtaaggtatttctttagacagaatagaatttgtaatcctagaacatcagagtagacacctatagatcattttatccaacttcctaattttcaaaaggaaattataaaacctgaaaagatattaaagtacaatgaagtagatctccagtggactttaattttggctctatctgactatgactataaatttgtcgtattcagagaagttaattgaccaaacatttcttgtgaatcagcaatgtgttacatgttctagaaaagttgcagcaaatttacagcacattaataaaaggacagtggccagaacagaagataggatgatgctgttagcctatgaaattgtcaaatcgtacatggagcaccatgctaaattcttgctctcacagtttcagtgatgtgctgaaaaactagggcatgttcacaaaggaatgttaaggaaagagagaaaatttgaagccataatgaagagcatttagaaaagatggggaaacaaaacttaccattactatttactattttagacgaggccctcacaatgcccacaacacagacaagcagggaggaggaaaattgcgagtgctcttatcttttatttctatgttgtggtcataatttcaaattgttcctaattcagataatggagccaataaatgaaattccacagtgaaaaaataaataaatacatacataaaattggctctttggtagtgttgctgatgcttatccaggaggacattttgagtgaaaagggctagatcaccacgtatcaaggatagaaaaactgcacgacttctaggttttcttgcaactcaagatatttataactgatcccttaattttgctttgttgcttttcatccacctttaaaaaaatttaacaaggtatatactttgttaagacttataaaataatgtatccattaaaattatttatatccattttgcaaataaatatttacaaaattaagatttgttagaagtaataaggaatataaattattaggaaaattattaacaatcacattgttctactcaaaaatttgatggcttttaaagtattttacaggttatagtgattttttttaatataaatgtatttaggaagtctctttattttcttgaaacttaataggacaatgtattgagtttgctcaaaattcaagaaaaatacataaacaggaaaaattacaaatatgtattggaagattttcatttttttaaaacaaggaaaacagaagatttaataaatttgtgagaacatatgcccatcacttattttatagatatgtttgaggtccagtaagatgaaattgaatcccttgttttctggcatgcctatgacactgagattcactttcatcatattatctagccaggcaactttgtcaattttgagcagtataggagatgggtattattgggatgtacgtaacagagaatcagacaacggtttaagctcacaaaatgatcttttctcaccacgaaaagaatagtgaagggaggttactcagggttgaggatggttcagccatattatgaggcgagtaggcactctctgctctctcttcctgagcatgaaggacctcacactcaaagtcattgcctcccagtgcaaagatgattgttatacctccaggccatgtatgtgcaaaaaagtaggaagggcaaaaggattcttcttgagagagtactctttttcagaattgtgtcacgtggacaccactagctatcagagaagttgagaaatttagtgttttacctcttctggttttagagttaggggacgtcaaggaaaaaggtggttgtgaatcaagttttaagttctcagtccgcaacactgtcataatcccatgaagattcatatagaatgacatcctattttttgaagcaaaaatgctccttggtgtttttaatcccaattaaaatttgctttaaattgattatgacttaattatatgtaaatcagaagatactgagcatttgctgataatccaatgtatttagaaaaaaaaggagaaatagtaattattgcaaatgtgtttcagtcacttgaaaatttgatgcgacattcagaggataacccaaatcagattcgcatattggcacagaccctaacagatggcggagtcatggatgagctaatcaatgaggaacttgagacatttaattctcgttggagggaactacatgaagaggtatgaagataagtgaaaaatctctttaatctaatttgcattaatgtatagcagatacaggcctctcagataaaatgagcaatagtttaaatattagctcagctttcaggtttcagagacaatccaatgccagacactgggtaaattctttacatgtgtattatagcatgtgatttcacaaaaacattgtaagttaggattcttaaaaggcaactgagacatcccaagaaggttactctgaccacagagttcttttccttactcaagatagaccagtatgtgtgggtatcctttctctctcgctgtctcattttattcctctccctccattccacacacatttgttatgtcacatgtaatctgctaataatacatgcaattctgttagtaccccatattatttattcttcataaataacactacatttcttatagataaattttcatatatcacacatggtgtgatttttcaaatcaaaactaaaacaaaatagcaaatttctcctagtcagtgttttgcatactatctcctaagaatggattatttgtcaagaagaaaacccattttataatgatgtttagttttatattcacttactgagtacatctactacatgtgagatatggttctatggtttgatgagtaggaaaaatttgctaaccttcataacttaaaaacattggttagttaaggaagagttactgatttcctagaatgtgcaagacataaaaacaaataatataacgtatgaagagaaaaaagagaataagggggggtagtaactagggtagtatgcatgaaaccattgactaatgacttattgaatagtcaatgtcggggaccttttgacatgcttacagattgaaaaggaacgccttgagtaggaaaacctcttctctatccaattctgaagagaagtatgtgagggtagggcagatatctgcaaatgtaccagcagcacctccagtcttgaatcctgggtggcatatccatattttatccaaatcaacataaggaattggggattggaaaaggggaattccaaacaatctctggtccttcatcattgttgcactattgctggatctgagtcaaatagatattgctatgtggcaagtaaattgaagatcatttcaatgtgggttgtgatatggaattggaatgtgtttttatttctatttgaatatcagtgtcaggtaggagacagcagttgcatcaaaaaattaaaagtcattgtgaaactgaccttggcttagctgtgaaaagactcaaatttttttttttttaaagacagggtcttgctctgtccctgagactggagtgcagtggcatgatcgtggctcactgtagcctcgacctccctgggctcaggtgatcttcccacctcagcctcctgagtagctgggactacaggtgcatgctgccactcccggttatttgtgtgtgtgtgtgtggaaatgttgttttgccatgttgtccaggctggtcttgaactcccgggctcaagctatccacttgccttggcctcccaaagtgctgggagatacacctggccaagatccaacttcagtgtttgacatttttcagtactcatctattctgtccttaggaatagcttactctctaacttgatcttggtattaactctattaatgtaattatattgcaatcctttattaacacaaaactacttataaccttctattttaaaggtttttggtataaaccctgacatttcccccaaagaaaaaataattcatttcagcaacataccctgattcaacacgtattatcttattttctggactgagtttttaaagcataaacttttgaataagaaaatacttgaaacttgggctagaataacaccttgtattagtagtcagggtccagacagggcacagaaaccactcagtcacttaaacagagatggtttaacacaaataagtattaactacttactggaaattaatttttaataggaaataaaagagatctctaaagaataccttaagcctgaggaatagtacacaaacaaggaactaatatggaaagataggagctcaacccaaggctggattcaaacttctttagaaagtgtgtgtctgcctcccatgggatgacagagaagtttccttcattgacccaatccagaacaagtctatagccagtgagctgaagctagtgtgaagagaatattggaggggaatgctgacaaaattcacagggaagtagcctatggtggggaaccattgaatttgctagaaagctgtctggtgtattcattggacatggtgggaaactacctgtagtggatgctactaaacttgaggaaatgaggtggggctccaggaagctgcctatggatttgccacccatcctcaatttgcttattgggtacccatagaacttgtcaaacacgacccatagtgttgctgaaagtcttctgggtaaagtggggtggatgaggtgagccttactgggcattccataggccagcccagagtcacaggtttgaaaaagaattaaaagcacactgggacagacaaacctctacctcccccattgtcactccagcatcctttactgacagaacttaatatcatgtcagctggcaaggggagaaatgttcccgtgtcaaaaacaggatcatgttgaaaggcaaaaaattgataactggcaaatccctctgtaattcactggctatgtgattttgagtaacagttttaaacttacgtttcctcatcctgtttcatagggggttttttttgtgagcaaaatataaaatacggcacttaaagtactatggttccaggaacacagtacatattcaataaattattcaataaatttaatacatgatcagcctttttattttgactagatgatattctagagtatcagccctcaaaaattgtgtgtgtgtgtttgtatgggtgtaaatatatatatatatatatatatgtaagtatatattaaaatatgtaaatatatatttaaaaatatgtaaatatacatatatatatatcccactgagggcagtgattggtaaataaatgcagatagtgcaatatgaaatataatgaaatgcacatgcctccattagttaaataaaatgtgaagacagataaaaaggatttttatcaccctctaagtcttaaaatcagaagctctccacttgtacctcaatgattaagcagagtgttaaaataacaataaatctaaaataagtaaacttgaaactattatcagtcctagctgtgtttatattacatatttggccagtaataacctgggagttatttgacaatgaaaataaagcatatttagtttttacggctttcatgaaaaccacatcatgttaaacataatatccttctcaaattctgttgtatcagcctgtgataagctgattagacctgaaagatacaatgttaaattaaaacaatgtgtagtaataggacttttgtatttctcaggctttgctcagcactttgatcaatttcaaactacttaggtaaaaaagacacacctaataatttattagctaaatcaatcctttggatatttccactatctagttaaaaagactgttgtttcgatgcagtagaataagccttgggataaattatctgagaggctgaagaaacaaaatgattacagtaactgagtttttaaatcaatttaaaaaattcttgttgtacattaatgtgttataatcaagaattctgaatttgttttaggccatgattctcttgatttttggttggttaaacaaaaaagtttttattttgtggttattttctatttttattttattttatttttttgagacagagtctctccctgaagcccaggctggagtgcaatggcacgatcttggctcactgcaacctctgcctcctgggttcaagcaattctcctgcctcagccagatttgctattaataaacaaagtgccttttaatttgaagatgagccttaacctattttttaaaatcaattaagtgcctatgtcagaggtttgtgaggtttttatatcacctacctaatgtttcttatagctgcaattatgcagaactaaggtaacattcaattgcctgttaaatcagtcaaacagccagacttttattgcctatgaatatttaaaagagatttgctagatcccatccctaatttcagagtgtgagtttgcattcaaataagtaataaattatttccatcacttcaaaaggcatctttcattcttgataatcatatagcactatattttctactcacagtaatgatttgaaagatggttagcaaaccaggcaacatctccaacagacgtaccaaatcatatcatttttacaactattgtaatagctttattctctaacagggtaaccaagcagcagaagatgatttagtaatacaacaaaatgaataataatattggtaatagtatttggttacagaggctcaggtacccttttaattgtcagatatgcattttctcatttagttctcacaatagccttatgatacatggtggtttttgtttttgttttttctttttttgagatggagtctttccctgttgcccaggctagagtacaagggtgcaatctcagctcactgcaacctcctcctcccgggttcaagcgattatcttgcctcagcctcccgagtagctgggattactggcacatgccactacgccaggctaatttttgtatttttagtagagatggagcttcaccatgttggccaggctggcctcaaacacctgacctcaggttatccgcccgcctcggcctcccaaagtgcttgaattacaggcgtgagccaccgcatccggccgatatatggtttttcatattcccattctacagaaattgaaaggatattaaaggccctaggaaaaagctattgagcatttagacccatctctttacacttgaagcctaggcacgtgaccatttggctacactacctccaatctctgtgacccttttcatatattaaaaataaaaactctgctaataagtgaatatggcaattaacgagtttccccgtttttaaggaaagcttaaaacatggccttaaaagtattatggctgactaattaaaataaaatttagagtcttaaatattaaagtcacacattgagaagtccaaagcctttaccacttctcttgatgagtgattatttcacctctttcgtggcttattaatgcccgtatttcagtccctttcaaagatgtctgtaagttgttatgcctgacatgaaatagcaaatttactgaaagggacaaaatctaaattggttaattcttctgtaatagtaacatttatgatagactcagagagggccgtattaatttttcctggtaattatgactttgaatttttccctcagtgtcacatctaccttagcatagatagaccagaacggaagaacattgcttgaaggaagactataaagtaatctaggaaaataagtggcatattatgctttattaatttgtcaatatgttttgtagacaatatctgtctataataatagtaaaagccattactttttgagcacagttttacgtcagtccttttgctaagccgttagaagcaacatcaaacttaaatcccacatttgctttatgaaatagatttgattagcttacttcacagttgttgtgatagggctgacttctgttctcaagggctaggacagctaagtcttctgtaatgccctctggaaagcactaggatgctggaaaatgtctagtagttgtattttatgttgctttcaaagaagtataagtaaacctttaaaggctaggaaaaaaatcagatgaaactgaagtcatgccgtaacatgcctatgaccactgacatttgtatggtggagataaaagctaagactgggaaccccaattttaggtgaattaagtcatttgatggaaaagaaatatgatcctctggctcacgaaaatggtggagctaaacacagattccacataaaactggggttctatcagtaagataatgggcagagagaattctatctgcagagagaacaaacataaaaagacatctgtcttctcactgtgagtgcaaagtaatagaataattataataatgtcacctgaaaatgtgtgttggcctattcttgtaaggtgaggaactcttgagtgtatattatcacaaagggtaaagaaatatccaaacaagtgattaagtcagggtagcaccaggttaggagcgtcctagcattagttagaagcaaatgcaaattgtttaccatgaaaagtgccctcagtgtcctcacagattaaactcaggggaacttgagctcatcataaacacatagacatacacacactcactcacacgcacaagaaaagccctcatgaagcacagtcagcctatacaacgaacggtgagtttacttctagaattccggatattagaattgcaagatgtatagtataaaataaataggtaaaatattatagaaataaatgttattgaagttataaaaaagaaaacattgtaaaaatggaataaagaaatcaaaattaaacaactacaattaaaaattagaaaatgaatatatcatatataaacatattagttgaaagaaatgatttaaaagaaaactaaaagagaatgtacagactgtgttaccaaaaactaaggaggtggaagatgtgaacaataggtaatagatacaggggtggggagtagaatatgaacatataacttatctcaatgggagttttcaaagaggagaataaagaaaatggagattattattattcaatataaaaaaattatataacccaatttaaaaatgagcagttgagctcaaaaggcatttcttcaatgaagacctacatatggccaacatatatatgaaaaggtgctcaaactcattaatcatcagggctatgtaaatcaaaaccacaatgatatatgtcttcacatctgttagaatggcagttacttaaaaagaaaatcaagagatgacaagtttggcaagaatgtggagaaaagggccccttgtaccctgatggcaggaatgttaattcatgctgacactatggaaaacagtatggagattcctcaaaaaaaaaattaaaaatagaattactatatgatccagcaattccacttctagggatatatccaaaggaaattgaatgagaatcacaaggagattatctgcactctattgtttattgcagcattatttacaatagcaaagatatagagacaacctaaatgtccattgacaggtgaaaggaaaaagaaaatgtgatatatacatacaatgaaatattattcagcccttaaaaaataagcaaatcctaccatttcgctgtaacaacatggataaacctggaggacattatgctacatgaagtaagccagacatagaaagacaaataatacatgatcccaatcatattatgaatctaatacagtcaaactaatggaaggagaatgtggaatgcttcctgccaggggctaggggaagggaaaaatggagagatatttgtaaaagggtacaatgtttaggttatacaatatagataattcctagagatctactgtaaagcatattgcctatagttagtctatttacttaaactttgctaagaggatagaccttatgttaagtgttctgttacagaataataataatattagaataggaggaaagttttggagatgatgaataggtttatgtcatagattgaggtaatgtttttatcagtgtatatttatctccaaactcagcaacttgtgtatgttaattatatacagctttcttgtatgtcataatttttttgagaaatggagatggagtaatatatgaaggatattaaaggaaagtttccaagagccagtgacataaaccacttaaacagaaagcacattatataacaggcaaagtaaataaatagaaatccaatctcagacatatcacagtgaaagtgcagaaatccaaagacaaatttatattagcagctagaggtgagatggataacctacaaagcaattaaatttaggctgtcattagacttcttatctacaacaatgaataagaataaaaaagcaatggaaaatattttcaagatattgaaaaaattaccgtcaacctagaattctgaactcaacaaaattagttcttcagagtaagaggaaattagacattatcagagtgaaaaaaaagtgaaattttaccccaatagacccttactataaaaatgtctaaaataagtatgaagaattagaagtagtagaaaaataagttttaaaggttttagatgcaataagtatgatgaaaaaatagttaagcttttaaatacaaaaggcatttgttgcaaaaaatatataagaatatctaatttcatttaaaataatgttgatctaaaatactagattaaaaacaatatggaggggagttacagccacaagcccttttatttagaaagagggtagagatagtgattaaatgtcgactttatgctgtaataaattgtcaaggataaccactaatggagcatccacctgggaaacaatcaaagaatgataaaaggaacagttctcaatcagtacgcagtaaagcaagaaagaaggaaaacaaaacagaaaaatgtgagatgagcataaaataaaagaaaagatggtagaaaaatagaaatagaaaaaaatagatggtagaaaaataccagcggccgggcgtggtagctcatgccttaatcccagcactttgggaggccaaggcaggcagaccaggctgccaacaaggtgatacctggtctctaccacaaatacaaaaaaaaaaaaaaaaaaaaaaaacccaaaaaaaagtatccaggcttggtggtgggtgcctataatcccaactactcgggaggctgagacaggagaatcacttgaacccagggaacggaagttgcagtgagctgagatcatgccatttcactccagactgggtgaaagagcaaaactctgcctcaaaaaaaaaaaaaaaaaaggaaagaaaagaaaaagaaaaaaaaaatacatctgtagtcctagaactatttgctcaatacatttaatatataaatgtagaaattttcagaataaagcatcaaaattcaaaatacattgtttttaagaaatacataaagacacatatatcgaaaatggaaacagattttccgaaaaggattaatcaataaaaagcttagacacctaatttatttccagcaaaatagacattatggtcattatcattattaggcaaaaaatggagtaaaatataacagttctaaaacttgtacatacctggccgggcatggtggctcacgcctctaatcccagcactttgagaggccgaggtgggtggctcacctgaggtcaggagttcgagaccaatctgggcagcatggtgaaaccccgtctctgctaaaaatacaaaaattaaccagctgtggtggtgcacgcctgtagtcccagctgcttgggaggctgaggtgggagaattgcttgaatctgggaggcagaggttgcagtgagctgagattgcagtctccactccagcctgggttacggagtgagactctgtcaaaagaaacaaaaaaatctcgtacatacctgggaaaatacctttaaaacacgtaaagcaaaaatccacagaataacaagaagaaatacacaactatatcagcatggtgggagatttcataatgcctctttctttcaagacaccagacaaaagttagtgaagatagtgatgattaacagttgataaggtggatataaagactgtatagagaaccccaaatcagagtgtaaatttcatctgaagtacatggaaatgtcaatacatttcacatatttggtattattagggaaatactcttaaatttgtaacaagctagaatcaatagtaaaaacttgactaaagtaaataatttgtggatcaaagatgaattcaaaatggatggttaaaattcatagaaccgagtgataataaaaataaaaattaaaactaattggttcctgttaatttttgtagaagagacggaagggctgaaaactagtgagctaactgcccatctcaagaaaatagggaaaagtataataaatgcagagaaagtaaatggaaagagaagaattcaagagcagaaataaataaaaacaacatggaatcaataaaatttaaatgcccatattcatgttttaattagacaaatcaactgagagggaagtaaaaacaaatataaaatcttaaggatgaaaatgttataactacagttataatatatttttaaaatacagaaaatactaaaagctatgcaaataagtttagaaacttacatgaaatggatgaatttctaggagaatattgctacaaaaatgatggaaggggatatagaaagcctgaggagacagaaatttaatcacaaattaaaagtcttcctacaaagactatattagactgaaattattttacattcaaatttgaacacactttctaggaatagataattccagtcatcaacaaactcagtagaacatacaaggcaatatacatgtctggaaaatataaggttagaaaatttttttttttttttaccaaaatcagacaaaaatgaaacaggaaggaaaaccccatgccaatttcagtcataaattaataaggaaaagttctgaaacaaattattggccaactggatccaagtgtgtatgaaacagtgtttaagcttaatgttctccctttcctttctatattcactctttataatactttatgcagtgtcatggctttaaataaaatttacatgctaattattcccaaaatattatctctggcacagacttttgcccttaacttcagaccatatatccagccttctattgtgtatttttctctttggatatctcataggctactcaaacttaacatactcagatgacagctcctatcaaagctacccaacaccgttttctccacctctgttaatgccatctcattcctgaaatttctcataccaaaacttttaaaatgaactttgattcttgtctttctttaccagcctttctcttagcagatctgaaagatggtctcaacagatctagctgttgttttacttttatgttctgggtatatatgcaggtttgttatacaggtaaacagtgtgtcatggggggttggtgtacagattatttcatcacccaggtaataagcatactacctgataggtattttttctgatcctccccttcctcccattctctatcctcaagtaggacccagtgtctgttccctcattgtgtccatgtattctcattatttagctcccacttataagtgagaacatgtgatatttagttgtctgttcctgcattagtttgctaagtagaatggtctccagctccctccatgttcctgcaaaggacacgaactccttctttttgtggctgcgtagtgttccatggtgtatatgcaccacattttctttatctagtctaccatggagggcatttaggttgattctgtatctttgctattgtgaatagtgttgcaatgaacatatgtgtgcatgtgtctttgtggtagaacaatttgtattcctttggctatacacccggtaatggggttgctgtgttctgtttttagctctgccaaactgctttccacaagggctcaactaatttacacccccaccagcagtgtataaatgttctgttttctctgccatcccaacagcatctgttattttttgacattttaataatagccattttgactggtgcgagatggcatcttatcgtggttttaatgtgcacttctctaatggttggtgatattgagcattttttttcatattgttggccacatgtgtgtcgtcttgtgaaaaatgtgtgttcatgtcctttgcccatttttaatggagtagagtttttaaaataaatttgtttaagttacttagagattctggatgttaaacctttatcagattcacagtttgcaaaatatttctcccgttctgtagtttgtctgtttactctgttgacagagttcaacagaggaactctgtgaggaagttgtgtaatttaattaggtctcatttgtcagtgtttgcttttgttgcaattgcttttgacatcatcattacatcttttcccattcctatgtccaggatggtattgcctaggttatcctccagggtttttaaagttttgctttgacattttaagtctttcattcatcttgagttgatttttgtatatggtgtaaggttttattcttctgtatacggttagccagttatcccagcaccatttatggaatagggagtcctttcctcattgcttgcttttgtcggctttgtcgaagatcagaagggtataggtgtgtggcattatttctgggctttccattctgtttcattggtctatgtgactgtttttgtaccagtactgtgttgttttggttactgtagcactgtagtatagtttgaagtcagctaacatgatgcctccactagctgtatttctttgctccttctctcattaaatatagtctctgtgttccaaagtgaggaggaacaactgtgagattaagatttggtaaaagagaaaatgagcagggcaaatagagacaataaatctgtgatgatgaaaaaatgagaaagaaaggccagtaactgaaattgaatagtaatagggcagaaaagatgtgttgttgattttcaggataataaaaatttaagcatgtttgtagtataagggaagatccaatagaaagacataatatataagagcaaagtcttacaagataggatacacgagcaaaaaaaatggaaggattgactttggaagtgggaaagagaaaattgagataatacaaggaggttctgaggtggagagtagtaagtttgagaaagtttatccaccaaggataaatttatccctgagaagtaggtaactctgttttcaggttgtttaggactctgcacggtaaagggggttgggagaaaggagaactggtgtcattgaggaaatgagagtgaaaagtatttggaataggagctcttttgttttaaagattcgtttaaaatcaggagaagtgttagagaataatatcgtggactcagtagtagccaatgaagttattcgcaatggaaataatcagttatctgactttctcccgtaattttctgcaaaataattttatttagaaccacacacatacagccgcatagaaaatcaaaagcgaagggatttttctttgcgttatctttgattagcatctccaggttgtatttgattatattctgaaacaactaggattctagtctgaagtatcttcttccaactatattcatatttgcaagtcattcatctggttaccgccagtatgtcaaatgtgaatttcatgtatttttttttttttttttacaatctctctaacttaaccaatttaattcagatttttatgtcagtcttttagctgttggctgtttttcccaaaatgtcaggatcggctccataatttgggggactcagggaagaaagaaaatactgggtcccatactcaaaaattaagcattgtaagatggcaacagcagagcattaaaccaagcatgggctctcctaagcatgagttactgcataactgcacaggttgcatggctttgaagccaatttcgggtgtcatcttatacatttggttatttgtacacctgaaatgcttttgataaggtttgggagttaacaatttaggctcacttttatagattatcattacttgaaaatatttcattgaggataattaattaacaataaatgctttaatatttagaaaggtgaaatttaatcttattcttagtgtgttaataatggatatagcttctaggtttacatctttccatactttgaattcagggctttctttccttaagtagtaaaaaggatattggatatcttgaatcttgacttctcctaggttgaatgctctgcaaaaaacctttgtctttatataaaaattgcactgcaagcagactattatggcagacctctgtgttcaaggtgactgcaattttcagctgagtggtggactatgcaacttgttctcataataatattaattgaataaatggtcaagagtgattacattttgaggggaagaaacccacttgtgtaatatttacacatagataataaactcaatagcccagacctctttaatgtaagaaaaatagacatgaatgtgtatgctattttctttgtaaattagaaatttttccttctctatttcatgtatcttcttttgttatttgagaaagggatttttcttgtcctaccatcaattgtgtgagttaccttgattcttgtttttaataatattttaaaatacatcttgtattttaaatgtagttaccctctattttatagctacaggaactgaaagagtacatagccttcacaaaagggtctgtggtgaatgtgtttaattcttattttaatcaccatgaatcatggattttttctttgtaagtagtaattccattatttttagatataatttaccctacttcaatcaataatgtttccttggacagtcatatttacttttccgaaatattatataaaacagtagttaaatgtttttgttcgtctgtatgcctattatagaatattagcatttttggggtccagacacaaagggacacacaaacacatatatatacttgcatgtatttatatatacatgtatataagcacatatgtatacatataatcatgtactgcatttcaatatatgattaatatttaagtatttaatattcactctagacaaattatgtttgctcttggagggcattaatatctttgtgaatgagtgttaacatatccatttaatggtatcttgtcttcaaatatctcataatttgatagttgagttatttcttctgaagttggaatagcttttctacaagggcctaccaaaaaaaaaaaaaaagaataataaagttggaataacaaaagagggagttaatacataaaggaaaaccattaaggccgaaaaactaatcagttgtaaaagctaaatcagtagtatggattgataaagtagcattttagtgataaatttttggattgaagtttctcttttaagtttatcaatgtaccttttcagaaaaattcctcgagtttatatctttatgttaatgaaacttgtcaataactttaattatctatgatgattgacaactaatacttaatttctataacacacaatactgttctgagggtacatattcatctctctctttcatcttacgttttaccactctcaactttttaaaaccgttttctttgcaagctacttcatagattcttgagattgaataatcaaatctgttatttaatattcaggccaaatttctgaaaatgtttatttttttaaaaaaaatgataaatggaaaagggaatgttaaacaacatttctttgcagtgtattccagtgtccctagatggaatgaggaataaaaatatttttcaagttcatcatgctgtcttttaaatcataaaatgcatatatttattagtaatttttcattgaaagtatcaaagaaaattggagaatttccttactgtttctacctcactatgtttcgtatattctgaccagcattaataccaatttcatagcactctactgttcgctcttttttgctgtaagcccaactgattgcattttcttacctgttatttttcgttgttgttatttaagacatcttttctttctaacttcggtcttcatagaccttctcaatttcagctcatcaccaaaattacacagatagaagaatatagggactttggtgtacacatacccacttttgactccctctgattttctaatttagtagattttaattgaggctgagaactgtatttggaaaagttcattctgatgattattcaggtttgtgaaccccagtctagatagacctttatcagcacatgtataaggtgcactttgctaaggtgcattatgtgtcaggttcattcccactgtggaccagtaatttattcttgcccaaccactgctcatgacagatagatgatctctgtattccagaaatgaagctcctttccaattcctcaacaactaaaccaagcagaggaaaaagtggttttccttcacagccatagttccctgctgaagtagaatgaacgctttctaggaaactgcagcagatttttgatgacacggaaagggcatcactaggatcctcattatatattacctctctccctcacccgaaccacaatgttgacggaacagatacttcctgtggggaagatgctaagcagtcctgcatggctgtaggcattgtccacatcttaatcttcagctatatctgaggtatgacaagtttaacaatcctacaagttaaagcgtcacaccggaaacctgtttattcttctcccatgccaaataattccagcacgatgggtttcatctatagacgatgagaagatgccattgtggggtgaggacatagagaagagaggaagtttggaaccagtttatttctatttcagcaagcttaatgtattgtaagaacattttgtggcagatgaccctagtctgtaacaaggaatcgattgtaatgcatcattctgccagtgtttatctgttccctatgctcatataaacacacgagtcatctttctgcactcccaacctactcctaaagcactatacagaatgtttcgaaagcagaaggaaaagcagctgttccatacaccatgttcctgctgttcaaggtgcacatcccatccaaatgaatcatatcagagccaaagatcctggtaggagttcttttctacaaaactgcagtcttgtctatcctaacaacttggaggacaaaatattagaaaaccttgtaataaccttaggacacaataatgtagatactgactgagctagacctgaggactttttcaatgtagtgtggataagtaagatgacaggaagccataagcatactgtgccttgcacatcaacttctccagagccatgacaatcatctggagtatttgtgataaataaatattgttaatcttcatgtaattgggtaggatgaaaaaggaccagtcgtcccagacatcccaggagagaggagcatttttccagttgctcagatacaatttcaagttcgaaccaatatgaattacagttgaccacagaggccggcaaaatccatggcactgtagtccaagagaacctgaacactggccttagagtattatgagcctacatcacagtagaaggaatccagcagagatctctaatgcacatcagaaaagcaccatttctagttatcaaggctgtatttcacactgcttgactgaagattggaaactattttattcataggcaacctgtgtggccatccttacctggtctataaaaggaagtgtgatgaatttgcttcccatacatcatattaagtccagaaagccagagatgctgtgttgagtttctttcctgagagtctgaattcctaagtagagggactaacgagttccaaagttctttcactctgagatctttgtcacactactgtactgactggatatcactgaccttatttaagaggactatcaactggctagttcatctacattgtaaggactagtttgctcacaaccaccaacctatctgtaattggcctcagtatgctctctctcacttgggtacttctgtatttggctaattaacctataccacttggcttagaagcaccagctacattttttctaattttgacttctcatcttttccaacttgattttatccccagatttggacttttgtctcatgtataaactttatattttgcttgaacatgtggtctcaatgctgaccaagtcatccctagaatctgattctgtctcactattccatatcaggagacagcgacttaaatattttaattatttcctgtatcaataaattattcactgcctaaagtttagactttaataatatgaacacatgtgcagtcaaagagtacctcgccattgggccggaaaaatttcactgacttagggtggctcctgaaggtaccttgagaaagcttggatatgatgaatcctgtagacttattttatgtttactgaataatgcttcattcactttctttttgaagcttaaataaagcatcagtttgctcctgtcagggcagaagaccaatttcacttgtctacccatgaggataaatggatgcagcaagaatccagaaatgtcttagatatattactctatagctcattgaccattctatcaatgctcaatgctttacttgaaagtgatggctatctgatgtcaagttccattgataaaatgattcccaaacgttactttcaagtatgcttccttcagaggtcacagaagaacttcagtaacctgctaaaacctaaaacaggtgaagttcctattaaccatgacaccaagagttttcacatttatattctttcctggtaaagaaaattataggagctccatgctcacggcttttgagttttctcccaggtgtgttcaaacctagtgacattaacaaaacataaatctagaagcctttcgtgaataatgtaaccttctttattttatatttaaaggatatatatgcagacatgtacacatctttgtaattatttaccgcctatatccctattaaatacattaacaaatatgccacaggaaaaaccactgtaccaaagcccctcacaagagttatatttaaagtgggttaaagcaacatggttttaatttacttagtctttcttgtccaaggaacacagtgtgagacctcctttctttaggaaaaaataggatgaactaatttgaaaacaaagaaagcaacaaagtgaatcttgtgatgagctatgagcattggtaaattatttcttctgttgtaaattatcctcttctccctctgcttttctcttaatctccatttaattcccttttcaaaatcctaactctattctttttggaaaacatttcattaagctggtataagcatatctagacatctggaaatttttgtataacttttaaaggatctattacttaacaccatatgaaattatggaaaataaagtgttcctatctaatcaatctcaaagatttttcaagtgtacaatacaatgtgtgcttcaagtgtcagcttcttttttttttttttttttttttttttgagacagagtctcactctgtcacccagactgtagtgcaatggcacgatctcagctcactgccagctctacctcccgggttcacaccattctcctgcctcagcctcctgcgtagctgggactacaggcgcctgccaccatgccaggctaattttttgtatttttagtagaaacagggtttcaccgtgtcagccaggatggtttcgatctcctgaagtgtcaacttctttaaggctgtcatcttgccggttctaaacaactaaaaattgtaagaaccaatttctgagacaaatagaacattcttagtggtccttaaataattcctgatacttttatggcatgcttctttaaagaccttagaattatgcttcaggaatttaaattggttgttcagcaaagttaccaatcagtaggcaagttgttgcatttgacaggagcaatagttttcacgtggattatttatattcatgtatgttggtagacggatataaaacatgcaacttgcagttgcatgagacaaaagcatcaacatatctatcttagcttttcaatcatgtgatactactataatgctccatttttcacagatatttcttaagttctttatctcttcagacctcccgtaaaccattttctgtcttctgctggaccacattctagatgatctggatgtctatcattctcctttgcctttgctttatttgagtaagtgctgaattcgtggactgtgttagtagtttgatgcgtagtttcagccagatagatcagaaacatgaaatgcttttacatcatccaggtagatggcgccatgaatagatccctttgctttctggcctctgaggtaataaagacttaaatctaattgggttcagcttaaaatctcaatgtcatatttaatttaatatgcttccttgtttccagctcaagcttaagccatggtctaaaagactttctctggaaggcaagtgtggttagattccatcttacacctccactgcctctttttcttttttttttttttaactgcacttcagttatattattctccaatgtcttgggaagtaggagttaaggaaaataggcaaatgtctcctgttaactagctatttgtagctttgagtttatgatttgtgtgtgtgtgtgtgtgtgtgtaacagagatacaaagttcgggtttatttggggtacaagtatgggatctttaagaagtcttgcagaagctcttttgttttccccatctttaagaaggaaaatatgctctataaaaacatcttcaagcctcttgatcctgaggtactcttgctccataaagagtgttcctggtagatagctcaaacatggctgtcttcttccacgttcacttgacctattgagaaacgtttgccacaccaagcactggggagtacaggctgccccccttcttcactgtatcatttctcattcattttttacctatcaagtaggcatataatttctgaagcagacatcttcagaagcagagttggtaattaggtgtcatccctatctactctggactcccagaccctgtgatcagtggtcttggagctccacttacttgcatgggacaaaaaggttgaagtaccatcttcttttcccccttacggaataaacagagggagccatccctactctccctctgggccatgaattcagaagaccgattctttctaaaaccttcagagagttttagtataagtgggtatggtggagcaacaaaggcagggccagttttcccagctcttttgtaagccctttgctatgccctgctatttccatctcttagaatgagagagacttattacttgttattttcagtttaagactatacccaaaattctaagacaacagatagaattcaatgcattcatatccatagtgacagtttcacacttgctcttaagttaaatagaagagttaggtcaggaggaaatagtttatcaaaaatgatatacacccaccagtattcttagtacttggcacttgaacaaattgcaacctgttagtaggtaaaaaagaaacactaaaaggaaatagttggaccactgaactattgcttgatccactgaagcaagtgttgcttggtccactgaagttgagactctgggaaagaaaacttgactggtaaactctgtgaagtgaagcgtggttgtcaaatggagattaatgtcctctcatgggtctccactgtagtttctgaagggcaggttgagtaggatttggttttagcacatctcttgcaggactcctatcccaagacactttctataaaataaaacatattccatattgctctactttctgcaaggtacggacagtcaggttggggccaattaatgcactaccctaagcagaaacttcaagactttgtcgttgctttgctttatttgaattggaatttgggatttagttttcgttagttcatttactactaaaatcactcataaaaatgagggctttattttgacattggcaaaaatccttctttactcagaagaaaatatttaaaactgctggaaattgaaatgttttacatgtctacatcacaatgatgaatacaatgatgagtatttaaacaccaaaaataaaagtgtcttattacgagatgattgtaaacagtgcacccacattcttaatccatttgcaagcataagcttacccatcacctcataaatgcagtaaaattgctttttgtattgagtttaataagtatagtataggatacctagctcctttaatgaatgtgttttttgtaaaatattattaaatgattttttttctaatttggctttttaaagcatgcattcatatgttaaatacattttttggtttcaatattcggttttttatttcacatgcagagttttctcttccagagtttcttagacatgctacactttgatttatgtgtttgtaatattgtggtacaaaggttagtacattatttttaaaatggaaatgtgagaaactgtcaattcattgtagagatgactttacattgccagcaaaactcattaaactcttaaaactttttcttaaacttattttatatttccatagtactttaaagatataaaataattaatttgtgttaacttttacttagttttaattttcattgaaaactgggttaaaatatattatgtgtttttcttggtaaccattactaggattgttttctatttttatatttttgtcattgatcgccagttattaaaagatgtctttctaactttccttatatttgctgtttctgtctagctatataattcctcttactgctaagtggattagctaaagacatgaaataacattttaaaacaacagcggaacagtattctggaacaacaacaaaaaatcagattatggttgaagactttctacaaacttcattcaatgagacagcacaggtcaagcgggcagaaagtcagaaaattcataagcctgacattccatcagggtgcgcctaatcagatgtttagaaatagaaggcagcttatgccatgactagttgaaagaattctgcaagcttgcattgacatgaggtcttttcaatgactgagataatcaaggaatctgtgtaaatcagcctctcttattgactgtcaggccaggaaaagagccaacccacccgaagtcaactctgccatcatttcttaagccacactgttcctttcagctcatagaatctcatgaatagaaaaagttaggtttctaaaaagaattttgaggctagatatgtggtttaatgttattctatattacatcctatacaattaaaatctacagatgtgccttgtagagtacactgtttttgcctttagccagaggaaggaccaaatttaatacctggctaggcaattattacacgctgtgattggaagttttctccaaccacctgtcacaatgctgaaattttatcactagagatccatttctttggaagagctgtgggtaggctgcagccagtctcctctgcaatagaggctctgattatagccctgaacactgttatctgaaatagtaaattacctgatgtaaattttagttgaaattttgactgagaacaaaaggaagctatgtttgaattggaatatagggcaaagcctcggtcaccaatcttggatacagaattttaatagaaagagattaaaattttctccaaataatgtcccacccccattctgacacttttaatacaaaaacagatagatttattgtccaaaagatacatctctgagcagtggtgacctttgtttacaatttcttctgtaaatccattttcgtctttgactatttaaagttttctgtttttctcattaaaatttctccttatacttttcacccagtcataaataaagctattgggcttcattctaggaactggtattgagcaatgaacaggacagccgtaatccttgaactcattagagttgatagtctaaagtaaatgcagaccattaatgggagattaaatatgttatggcacatacaaagtgcaagaaagaacataatgtcatgtgagggaatgcataaatagcttaatttagccatcccgtaacatattcatatattaaaacatcatgttacgtgctctaacttgatagaatttttacttgtcaaatcaaaaaaatacaaaattcaaagaacatgcaagaattacctccctgaacttagaaggtgccagaggtagccacttggaagagatgtccactacattaagaagataaatgtaaattagccaataaaaggaagtcagaattgagattatgccagtaaaagggaacaacatgtttaaggccaagaatcaagagggccacagtgtaggttgggaaataaaaaataaaatttctgtatagctagagcagggagtaaaagacaccagcaggacttatattatgaagggacttttaagccacattaaggataaagcttttggctgcgcgcaatgtctcacgcctataatcccagcacttagggaggccgaggtgggtggatcatcttaggtcaggagtttgagaccagcctgggcaaattggtgaaaccctgtctctactaaaaatacaaaaattcgccaggcatggtggcaggtacctgtaatcccagctacttgagaggctgaggcaggagaatcacttgaaccagggaggcagaggttgcagtgagcagagattgtgccactgcactccagtctgggtgacagagagagactccgcctccatctcaaaaaaaaaaaaaaaaaaaaaagaatagagcttttatttgaaggacagtaaagaatcactagagaattttagacaggaagccccaattcgttattgagagaacacattgcagctgctttacaggtgggatgtggcagagtaaaatgccagtgaagaaactgatagcatatttgaggtaagatatagtaatgattttaactagagtaaagacaatggagagagagagaaaagattggaatcaagaactatttagaaggtataataaataattagtgattgactgattagatgcaacatgatgaaggacatgatagaggaagtagaaatatctagaattacatctaataaagggaatcattatttgtttttcgctgaaaccggaaaaaatacagagaaggaggaaaagcaagttggggagttgagaagtaggtgagaagagtatatgcaaggagttcatgtgtgggagtgttagcttttggtggttgcagaatattcatgaggagatgtccaatagggtgagataacatgcaagtatggagatcaaggggagatctggacttgagagatgtagagttgagagttgtcagaatgtgaggaggaattgaagttaaggtatgggtagaatgagaagaaaggaaagcccaggataaaatcttaatggagtcaaaatttatggtacagggagaagtactgggaaagccttccctcttcctgcagcatcactaaacttcctgttcttttgccttagtctagatgcctttaactgtagttttacttgggcaaagctgtgttataggctggcttcactgaagaataatgacatcactaatatttttaaagcttaaaaagtatagtatttatgtaatatctaatattctatatataatataaaaaccaagatcatcttaaaacctcagtcatgctctgtgggaaagaaagttatattgtacctgataatcatgcctttacattgtatattaaggaaatgtattttaaatgacacataatgaattcccaataagttgcctgccctatttcttacttttacaactactctgttaaaagtgaacagatccttgaagggagactttccaatctgtgcagcatggtatttatacttgaacattattgaattatcctaatcatacttatagttacaatcaagattaattgcagctatattaggattacttattattttttctacttcagcagtaacataaacccaattgtacaaacaatttctgtaatccaaattgtgaaagaaagtagggagaaaaaagatcatgcaaagctggttgaaatagtattcaaaataaatctttaaccagactgttatctaaaattctgtttttgacaaggagctgattctgaacagattgtacatgtatctcactggtggaagcagattatctgtcttgaattggattgtgatgacgatgaccctattctaagcaaaccaaatctcttgaactatataatgagatcaggaggaacattcgacctgagaaagacagattgcaatgactgagatgattttgctaattttttttccagcctatttccttaatgtacgtgatattgtgattgattttcatgcagagatccctgatcctatagttttgtttgctatttatttttctccttcacattttttttctatcaacagagctgaatgagtgccaggaagctgcgaaatctgtcttacaaaaaggtgattgtggaagagtctagaatcttcatttattgttcagcaggattacagaaaagctatcaagagtaaacatttaactgatacactcttattccttctttttaggctgtaaggaggcaaaagttgcttgaacagagcatccagtctgcccaggagactgaaaaatccttacacttaatccaggagtccctcacattcattgacaagcagttggcagcttatattgcagacaaggtggacgcagctcaaatgcctcaggaagcccaggcaagtacatctgggaatcagcttccattcttttgtttttattacttcaacaaaatgttgcagtgtttctaactttaaatttattcaactagttttccatggggttgttttgattcactgatttgactatttggaggtaggtaggaagaaaagggggtctagatcattagtctaagatttatttttttaaggatgtaatggaggaatttgaaataaagacatttcaaagacaggagcaatacgttctggtgtttctgacttcaaactatactaaaagctagagtaaaaccataggatagtaaatggtaaagaaaatgttttttggccgggtgtggtggctcacacctgtaatcccagccctttgggatgctgaggcccacgaatcacaatgtcaggagttcaagaccagcctggccaacatggtgaaaccctgtctctactaaaaatacaaaaattagccaggtttgttggcacgcgcctgtaatcccagctactcgggaggctgaggcaggagaatcacttgaacacgggaggcggaggttgcagtgagccgagattgcaccactgtactccagcctggaacagagcgagactctatcttataaaaagaaaaaaagaaaatattttctatggcattgttggaaagcagtctcaaacattttattataaactcctcgtttagtcacatggtctatattgttttataaaaatgtgttagttacaagcagtgagtaacacaaaattatcgatataaatttacacctcaattattaatgatcatgctcaatatagctacatgcactcactcccatgcttcattcaaacgaaaatataaaacgtgtttacctgtttttctagaatgagaattaaaatagtgttgaaaataaatctgagttgacttttaaatgagtaaattttaggccataactaaatttacattcactgtaagaagtatttttaaaatgctgttctcattttttaattaacatttaaacatatgtgaagttatcataggtattatttattcaaaagtctttagggttgtgtgatcgcaattactagatctgcttttcaaatcttatatacatgttgtgaacccaatcaccaagtccatgctatgatgagaggagcactagaaggttagctgcaaatctcaaagccttctccctgccagttggtgaagatgtctgaagtttttcactttaaaatgaatttgggggtgatatattagatttgtagatcatggttacaatgcaattacagttaatgaatcaccgttaataggtgttctgggcaacagtatacacaatagcatgagttaatttaccatattgtctaactttgaccaagaatgtccctgataatatgtggcagagtataggtagttttgataggcttaaaaagtccagggaatattatttccttatggagtgcatacaattgcaatagtggatgaagaaagagaattttggggagaatcctgatgataaaatcctcatcatagttttccactgggcaacaagagtaaatattgtagtagaagtgagggataatagtaaacatacttgaggattcaatttttaatttgtcttgatatataatgattgtacatattttagagggtaagtgtgataggtttatacaaacctactccagtatatatatttttcaaacttacacaagccaggttctctagaattaactattcctaagtccgtcccagtttgagtcataatgaaaaaggttttttgatataaaatatttatacatatttatggatacaacatttatgtaatattttcttacatgtatagaaagtgtaatgatcaagtcagggtatttagtgtgtctaccacggcagggtttagtaaaatgcatgataggaatgagtaattgtttctgaattgagaagaactacatgactataaatgaaatacagagtagaactgctttcatttaaactaatgacatgagttttgaaggaatgtttgattaaaaatgcttgtgacgttctgaatggaattaaggaaaaatttgagcagtatgaatactagacattaatattgcaagtttgtacttcaaaatgcataaagaattactttgtgacagacttgcggaatgaaattatgagtagcaaatttgataggcaaagctattatactattgtctttcaaggaaaattggagcttttagggcgaagcatctttagttgaacaggttgtgataaggggcactgtgtgttttttcttatttagaaatggattcaggattttataaacattacttgtttttaatagcaaaatattttgcttggtttttctaaaaaaatactacaataaaaatgttattaactacatcagtagaaaagtactagtaaacagcagaacacagataaattatgaaatttcagatctacttcaagaaagagattttgggcattcagatcaaatctattttccatgcatttcaggtcacacctgcattatcaacatagttcttgacattgagtctccccaatggtaatacataatattggagaatacaagccatctgaaagctcttaaaacattcttctgctccagggttttattttaatatggcagtaagtgaattgttttctagaacagagttctcaggtactcagatttgcttcaaggattatatttcctgaaaagcagctcgaaattcccatgaaataaaatagagagtcaaaagttagatagtgaaataacataagcacagtgtgtaagatgaaggatccactaagaatgccaccaaaatgacattttaaatatagagatggggtggatagatggatggatgtatggattgatggatggatagatagatagatagatagatagatagatagatagatagatagatgaaagaaagaaaagaaaggaatagaatagggactaacttcaatgcattgtattaacaaaaatgtgtttctataaatttgcacttaaagataaaaaggttattgctaattaaaatattagtgcactataatttcttttctcataaatggtatatttagcttaattcatcacggagaagcaggaaaaaatgtatgaagttaccatattaagtcctctttgaaatacctgctcagattttctgtcatatactggtcacgcagatttgtgggtgtctgactccaccgtgtggtgcactgagagttttgctagttaatttgaatcttttagagcattattttttctgcattttaagatcgtttgagatcctcagatataaaagctatggcactaaggaaatgcatactgtatgtacaactttctgacaaccatactcttgttatatataaaagtagatgtagatcaggatgcttctttacattcacattggcatttattactataggaaagaaaagagctgctcacttccttagtgtgttaattgatcagttatttctctgggccctcagattctgaattggatttaaaattatgttacttattttagtgacatgagcttacctacagaagcaaagcttacacttttagaaaataaagctgcatgctgccaggatgtaacagcatgtgttgacctaggagtattttatttcaaaagataacacttagccaattcacagtctttttttttaatactttaagttttagggtacatgtgcacaacgtgcaggttagttgcatatgtatacatgtgccatgttggtgtgctacacccattaactcgtcatttaacattaggtatatctcctaatgctatccctcccccctccccccaccccacaacattccctggtgtgtgatgttccccttcctgtgtccatgtgttctcattgttcaattcccacctatgagtgagaacatgcggtgtttggttttttgtccttgcgatagtttgctgagaatgatggtttccagcttcatccatgtccctacaaaggacatgaactcatccttttttatggctgcatagtattccaaggtgtatatgtgccacattttctaaatccattgtatcattgtgagacatttgggttggttccaagtctttgctattgagaatagtgccgcaataaacatacgtgtgcatgtgtctttatagcagcatgatttataatcctttgggtatatacccagtaacgggatggctgggtcaaatggtatttctagttctagatccctgaggaatcgccacagtgacttccacaatggttgaactagtttacagtcccaccaacagtgtaaaagtgttcctatttctccacatcctctccagcacctgttgtttcctgactttttaatgatcgccattctaactggtgtgagatggtatctcgttgttttgatttgcatttctctgatggccagtgatgatgagcatttttttatgtgtcttttggctgcataaatgtcttcttttgagaagtgtctgttcatatccttcacccacttgttgatggggttgtttgcttttttcttgtacatttgtttgagttcattgtagattctggatattagccctttgtcagaggagtaggttgcgaaaatcttctcccattctgtaggttgcctgttcactctgatggtagtttcttttgctgtgcagaagctctttagtttaattagatcccatttgtcaattttggcttttgttgccattgcttttgttgttttcgtcatgaagtccttgcccgtgcctatgtcctgaatggtaatgcctaggttttcttctagggtttttatggttttaagtctaacatgtaagtctttaatccatcttgagttaatttttgtataaggtgtaaggaagggatccagtttcagctttctacatatggctagccagttttcccagcaccatttattaaatagggaatcgtttccccatttcttgtttttgtgaggtttgtcaaagatcagatagttgtagatatgtggcattatttatgagggctttgttctgttccattgatctatatctctgttttggtaccagtaccatgctgttttggttactgtagccttgtaatatacagaaaaagagaattttagaccaatatccctgatgaacatcgatgcaaaaatcctcaataaaatactggcaaaccgaatccagcagcacatcaaaaagcttatgcaccatgaccaagtgggcttcatccctgggatgcaaggctggttcaatatatgcaaatcaataaacgtaatccagcatataaacagaaccaatcacaaataccacatgattatctcaatagatccagaaaaggcctttgacaatattcaactacccctcatgctaaaaattctcaataaattaggtattgatgggacaaatctcaaaataataagagctatctatgatgaacccacagccaatatcatactgaatgggcaaaaactggaagcattccctttgaaaactggcacaagacaggggtgccctctctcactgctcctattcaacatactgttggaagttctggccagggcaattaggcaggagaaggaaataaagggtattcaatcaggaaaagaggaagtcaaattgttcctgtttgcagatgacatgattgtatatctagaaaaccccattgtctcagcccaaaatctccttaagctgataagcaacttcagcaaagtctcagcatgcaaaatcaatgtgcaaaaatcacaagcattcttatacaccaataacagacaaacagagagccaaatcatgagtgaactcccattcgcaattgcttcaaagagaataaaatacctaggaatccaacttacaagggatgtgaaggacctcttcaaggagaactacaaaccactgctcaatgaaataaaagaggatacaaacaaatggaagaacattccatgctcatgggtaggaagtgtcaatatcgtgaaaatggccatactgcccaaggtaatttatagattcaatgccatccccatcaagctaccaatgcctttcttcagagaattggaaaaaactactttaaagttcatatggaaccataaaggagcctgcatcgccaagtcaatcctaagccaaaagaataaagctggagtcatcatgctacctgacttcaaagtatactacaaggctacagtaaccaaaacagcatggtactggtaccacagtcttaaattaaattatatggccacagcatcaatctacccagtgtcagctcatttaatgagagattttattaaagtacaaaattaagaaaagatttattgaaacagaataaagcaaatggggaaaactcttctagatatggaaatatatcttagaaaacagaaactaggattatttccaaagtactatgattaaaaatgtaacaacctatgcgtgttccttggaaataaataaaaaattaaatcacgaaattgtgtgactgcaaagaaacacatggaacaaatttagtcatttactgttcaatttttcagaactatatattgaagcacagagtttagttttggcacctaaaatcctatagcaacagtctaagtaaccatgctgagccccggagcaatcaaatcaaatctttaggtggatttggtcttcagaatttttggaaacttttttattcattctaatgtgtagctaattggagaatggctttggatggttccctactagtaatgactaaattgttccagagtatttttcatacgacattttctatcactcttctataaagattctcttctatgactgtgtcaacgtttcaatgggagggagtcagagtggcaatcaaactactggtgagattctctcctattttgattttttcctctaatggaaaatgggtgatggaagaaaatatagctgagagctatcgcacaaattttaatttagacaaaaagaatgttcaatatagatgtttgaggctgaactctgcttggctttcttcaattcatttttttctaaccccatttgttaacatgtcaattaacttgcatatggctcttaatcattttaggggacagtgacaactatgtttaaatagctacttaaatgtcttgcaatttttaaaattacaaagatactttcacatacatgatttttttccttttctactaattttagttttgaatctttgatatgtaagaacaacccaacatgggcacctgttgaaagtcaccatgtccttatgtgttgatgcacattttgtaggggaaaacatggccctgttgcttaaattactgcaagcaagagcggagttgcttagcagtggctccagtagctttactgttctatttgttttttcccaaagaattctgatctcatttttttgtaacctcgtgtcccacatagtagatttatgagcaggaatagaggaaggaaacaaattaccttcaaagaagagtgcctcataattaaatattgaaaaatactgccgtggtttgctcaccaagctaggacgtcaggtgttccagagtccactacagaccagacttcctccttctctttttccctcccattaacaatgtgagtacaatttagaaaagaggggatttttaaagcaaagaaagctattaatttaaactaattacgttaaatgcactttaagaagaattcgtaattgcaatcttcccgtgtttatcaaagaagctaaatcttataactcacattaaatataatcggtcatctttaaatgttaacattccaagctatcaaaatcaatggcttaaaaataaagatataactgcagattttggtctatcagattgagcttttgatttcattaaggaataaaacagactcttatagtgtaaataggcatatttgattgccaaacgacttggaacagtgtaactttacagtctgctttattgatttatgagttagacagcagaaacctgcaaaggggaatttatgtggtaattggataatttagtcaaagaagaaaaaaatggagaactaacccagagatttgggttcaaatattaaaacctatctagccatagatgtagactttttattttctttttacacagcccagtagatggtaaacctagtgcatttaattttgaatctgttctaacattgaaaggccacccctatgtgttgctatacagaacttattactctccatttaagaataacttgttagtttcatatgtttaatagtgtgggaaacagtcataaacacaagttgtaggaaatgtaaaatactagaaacttgccacacgtcactgactgtacttggacaacctgtacattattatgtcctcactggctatatgataaagatatagatttctttcatattattttgatgtgtacattttaagactgcaattaaactatagtatgcttttgtaaaaatctatctacaaattctacatataaggatgaaattattaaaattaatggcaaaaactgcaattacttttgcaccagtctaataacttcacgctacagccacagtgaacactattgcaacactctgaatattttgaagtgatccaaatttatcctattatttcccaattttgtcttatgcaaatgaatatttacttcaaagatagcacacagaaaatttatcgatctaaaatgcacagccagataacacttagcataacatactatgttttatttttctttcagcgtttatcgtgattgttaaatcttttatttgctttttaaaaattttccccgtctattcccattctctaaccactaaagttcagctgtaagaccgtgggccacccagcagatttctaacaaatagctggcaaatttattgaattccactgaggtttagtcactaagtatgtgtcagacaaatgtgataggcagtgtaaaatttaaaatgtgaataagcctaacgtggtccttgccatcttgccactcattagatagcaccaaagaaagataaaatttagaaattgctggccacttacgtttaccataatagtgaagaaccatttttccaatggaacttaatagtatcataaagacttcttgtcataatgccttatgattgcccaactttgaagctctgaaaacctttccaaaatactttgaatagtataaaatggaactcttcacatgaaaaggaaagactgatggaaaatatatattttagcctctttatgtattacctagtttttaaggattataccatgtgaatatctaatattttgaaagcattcacgttatttggtaattacagcagcctaatgaagtataaaagttgtgtttaaaagggaatatttgaaaacactagatgaatggttgaggcatgggttgagaacaggatgtgaatgaaaatggacacacaggtttaggggttaataaaaaatgtcctaaagttggattgtggtgatatatacatgactctataaatttcctattgttcattgactatatgtttaaaatgaaaattttatggtatgtaaattgtacctcaaagttgtttttaaaaccctattgaatagagaatatatcaattactattatatatttaaaaagataatttaaggttaccatcaactttttcactccattattttgatgcatagcaaagggtgaaatgtgatgaatgttgttaaataacctggaattaacttaaatggtagatatttattgatggcctactgatgtccgcaagatcttacatagtaatatcataatgttcccattgtttacattctattccatttaatgaattttaatgctaaagcatttttactgaagctgatattttaactcagatctgctttctccactttaataattagccctttattaagtgaaaattaacctagaagtacaatctcccaattatttctaggcagcattccaaaatgttccctagagtttgatttactcatttatctattttgaaaagtaaccataattacttgaaaatacgttatttctattttcaatgtttgtaggcacgtagtagatgtataaacgttacatgagatattttgatacaggcatgcaatgcgtagcaatcaaatcagggtaaatggggtgtctatcaccttaagcatctatcctttgtgatataaaaaattcagttgtactcttttagtttattttaaaatgtagactcaaattacttttttattatggtcatcctgttctagcaaatactaggtcttgctcattatttctaatttttgtacccattaaccatccccacttcctccccaacccctgactacccttcccagcctctagtaaggatccttctactctctatctccatagttcaattatcttaatttttagctcccacaaataactgagaacatgggatgtttgtctttctgtgactggcttatttcacttaacgtaataacgtacaattccatccatgttattgcaaatgacaggacgtcattctttttatggctgaatagtactgtattgtgtataggtaccatattttcttttttttattattatactttaagttttagggtacatgtgcacattgtgcaggttagtcacatatgtatacatgtgccatgctggtgcgctgcacccactaactcgtcatctagcattaggtatatctcccaatgctatccctcccccctccccccaccccacaacagtccccggtgtgtgatgttccccttcctgtgtccatgtgctctcattgttcaattcccacctatgagtgagaacatgcagtgtttggttttttgtccttgagatagtttgctgagaatggtggtttccagcttcatccatgtccctacaaaggacatgaactcatccttttttatggctgcatagtattccaaggtgtatatgtgccacattttctaaatccattgtatcattgtgagacatttgggttggttccaagtctttgctattgtgaatagtgccgcaataaacatacgtgtgcatgtgtctttatagcagcatgatttatagtcctttgggtatatacccagtaatgggatggctgggtcaaatggtatttctagttctagatccctgaggaatcgccacactgacttccacaatggttgaaccagtttacagtcccaccaacagtgtaaaagtgttcctatttctccacatcctctccagcacctgttgtttcctgacttttgaatgattgccattctaactggtgtgagatggtatctcattgtggttttgatttgcatttctctgatggccagtgatgatgagcattttttcatgtgttttttggctgcagaggtacaaggaggaactgataccattccttctgaaactattccaatccatagaaaaagagggaatcctccctaactcattttatgaggccagcatcattctgataccaaagccgggcagagacacaaccaaaaaagagaattttagaccattatccttgatgaacattgatgaaaaaatcctcaataaaatacttgcaaaacgaatccagcagcacatcaaaaagcttatccaccatgatcaagtgggcttcatccttgggatgcaaggctggttcaatatatgcaaatcaataaatgtaatccagcatctaaacagagccaaagacaaaaaccacatgattatctcaatagatgcagaaaaagcctttgacaaaattcaacaacgcttcatgctaaaaattctcaataaattaggtattgatgggacgtatttcaaaataataagagctatctatgacaaacccacagccaatatcatactgaatgggcaaaaaccggaagcattccctttgaaaactggcacaagacagggatgccctctctcaccactcctattcaacatagtgttggaagttctggccagggcaattaggcaggagaaggaaataaagggtgttcaatcaggaaaagaggaagtcaaattgtccctgtttgcagatgacatgattgtatatctagaaaaccatattttctttatccattcgttttttaatggacatttaggttgcttccaaatcttgacttttgtgaacagtgccgcaataaaacacgggagtacagatatttcttcagtgtactgattttctttcttttgggtatatacacagcagtgggattgctggattgtatggtagctctgtttacagttttttgaggaatctcaaaacttgttttccatagtggttgtactagtttacattcctaccagcagtgtatgagggttcccttttctccatatcctcgccaacatttgttattgcttgttttataaataaaaccatttgagttgaagtgagattatatctcactgtggttttgatttactattctgttatgatcagtgatattgagacccttttcatatacccgtttgtcatttatcttctttcaaaaaaaagtctattcagatattttgcccatttttaatcagattattagttttttcctatagagttgtttgagctctttatatattctagttattgatcccttgtcagatgggtagtttggaaatattttctcccattccatgggttgtctcttcactttgtgggttgtatgctttgttgtgaagaagatttttaacttggtgtgttaccatttgtccatttttgctttggttgcctgtgcttgtgtggtatggttcaagaatttcttgcctagaccaatgttctggaggtttctcccaaagttttcttgtggtagtttcataatttgaggtcttagatttaagtatttaatccattttgatttgatttctgtatacggttcaagatagaggtctggttttattctgcatttggatatccaattttcccagcaccatttattgaaggactcctttccccaaagtgtgttcttggcactttgtcaaaaattaggtccctgtagatgtatggatttatctctgtgttctctattctgttctattgggctgtgtgtttgcgcttaagccagtaccatgctgtttcggttactatagctgtgtagtataatttaaagttaggtaaagtgattcctccagtttcattcttttttgcttaggatatatttggctattctgggtctgctgcagttccatataaattttaagattgttttttctatttctgtgaagaatgtctttgttagaaaatacattattataatgaactcttctattatcgttgtcgttattatgactaagcgtaacatcgtttctcaggtatattacaagtaataattatacacaatgtccaattttttatttttaaacggttctgtggtcaagattacgcagaaaaatttatatgctttacttctctgctggagatttttgacccacttttttgtattttcaaaaataaaagtttaacctaaatttgataagaagccacagacactttttcctccagaaatatgttgatataccacaaaactcatatgtcaaggaacaatgtaggggagacactgaaatagactgtttcctttggcctattgcatatttctgataaaagtcaaaacttctttagctgacaaaatttaatttaaaggtaatatttttctaagtaactctacttgggggggggggtttaaaaaaagagtagtacaaagctgtgtgaatttcttctttttttacttgttgaattattataaagtataacctgaaacttttcaacattttttttctatgaaaataattatatttcttgcattttcctatctttggaaagtacatatcatcccaaatcttttgatatattttgtttctttcgttttctaagtacgtgtgatatgtggccatttccctttcttgaaaatagcaatttcaaaattactggctctttcaaaattactaatctaacagtggtacgttcctccatcaatcagtagtctcaacatgaagtattttaatatcttttactaaaatattttcttattttctctaaatttttcctttctttgacaccacagaaactccaataattatttgatatcattttcttcattctgttaagtactttagcctgctgcagtataattttgctggccattttctgttactatatatatgagaatggtttgatgaggtaaagcaagattttaaaaacagccctgctctctgctcagttaactgtaaagtcctatatttaaaatgtgattaatgtttgaatgattttttggttctataattttgccctttaccatattcaatggaaaaatggttaattcgatttcacttgttttattttcctactttgaatatatagtgctgtgaacatagttactgcatgctcaaatgccttttttataatggaatgttgagataagctcaaatgtcttttttaatataatggaaagatgatataatttgctttatattacttgactttgatgaagaaaatctagtgattctgaaaggtactggattgagaacacctcatagagcatatgtgagtgttcacatcagtatccgtgatttgctatgtcctctcactttgtttccattagagtttactgattttatacgaagccaggctgataatttcacaagaatagttgtatgtggttggcttatttgttttcttcaaatgcttactatccatatccccctagatgtatatattaggtgaaaatataactcaaattatacatccctcacatctttaggacaacttagaaatctagtagacaagtagagagatcattttccttcagattgaatcttctatccccaatgttttcttccacaattttattttctttcatcatattctcataatgtcaaaaaagaaaatgattacattgtctttttttatgagtgatttttacataggagattgttcttcccagaagtttcaataatattctgttatttgtacaagttacttttctatttcacaataagcctgcgctaaagtgctaagcattttttacttatgtggttccagaatacagttctgacgaggttaggtaaagtagctggtaaaagatatcctaagtacaagctaaaagttaattacaatttaaatgtaaattttgtggaattaatgtgtaaagatgctggcaaatatgtgtcatgcatgttttacagcttacccatagtagaatcaattggaaatataaagacattttattttataattttagtaatgaattgaattattattaatgaatatgttaagtatatttgatagcctttttccaaatctacttgtatgatgcactctggcaaaaaaaagcaaaaggataacatctacaaagtgttgtatgattcttggatatacacaatatatattaataaatattctgagaagttctgtggtatagacacatgttcatcttcaatttccaaaatatgtttaaccactgagttctttttaatgcataatctactcaatgcataaagaaaattttatctctaatcatattggaacagtactacaaatatgcgaatttcactagaaatgcctatacattatgataaaagtctcacttttatatgatgttcaatgatgatttttttcaatgttaataattttagtggtggcgacctttctaaaaacacagaagctcatcctcaacagtttttctaactatttaatggaaatatgtatatttcaaattccatggaatgctttgccttgagctccaaattgcccaacattcctctcacaggttacttggtccttcatgtcccctgccaacagataaaagtcgagtgtttggttatatgtaagctgttgttgttcctattatttatgacttatgacaacaatatgactcatttgggaaaatgtggaacttatcaggaaggcctgtgttgcagtgatcacttacgctatctttgctttgctttgtaatgctgagcttctagaatttccaggggcagtctttgaaaaaaaaaattataaatagaaaattaaatgctggtttatagaagggtctcttgcaagtgagaggcactgaaacttaaggttctgtagcttcatactaattcctcatctagatagtaattcttactaactcacattcagtctttcctcccattaaattaagcacacacactctgcatgccccaagcctaatctttgctagcttgtttcctacagcctaaaataagatcctatattcttattctctgaccctccaaaaccctttctcagccatatgctagttaaatcatgtaaatttcctaaaaatcaccagattatacagcagatattaatatttatctttctgatcacagagcatgggtttttctgtttttaaaatttttttaaattatactttaagttctagggtacgtgtgcacaacatgcaggtttgttacgtatgtatccatgtgacatgttggtgtgctgcacccattaacttgtcagttacattaggtatatctcctaatgctatccctcccccctccccccaccccacgacaggccctggtgtgtgatgttagtttttctattacattgcatatatttctgctttgtaatttacttatatatctacagtctgcctcttaaaataaggcttctgtaagtataggggcaacaattttgttctcactgtgtggaattgagtagtagaagctgaacgatttgttgaattaaattgactaaatgctatcaacatacgaataagattaaatttctttttttctcacaaatgtccatttggaggatacttttattttaaaatcataattaaagaggcagtataattgttagagggcagcaagtttgttacttcctagttatgttaccttgggcatgttgatgtttctaccttcatttgtacatgaagatgataaatacttatgttaatatgattaggagatggaattaattatataaagtgttagcacataagttcccacaaatatctgtggtggtgaggatactgatgatgatttcttttctttttttttttttttttgtttttttgttttttgctcttctttgaccactctggtataaaaggttaaaggactatgtgtatacttcattttttcctctactaaccttggaggctaaggggatggaaaaacttttaaatacatgtacacagatatgattacagatgtataatttgggccctctaccctctctgagtgtattcttatttttttaaatcagtttcctttcacagtctccacaattgctattgaacttttatcactttgatttaaattccaccttgattctctcctctcatcctcagcagatacctagggttttgtgcttacgaggaaatgacatgttatatcgctgataacttataactaaatatttgtgcaaataacatggacaggtatttttacatatactgtcacatctgatctttttgaccaaaaccaatgtagttgactactgaagaaatgagaatttctcagataagaaaacttcattgctggcttgctattatcattcttgggctagacatgagaaaatcaaggttcagaacatgttgatgctttgcccaaggtggcaagagagagccctgaaatttaaatcctggttactgttaacatgatttcaccctgatactctgagagcaccatgtaggaagcattcaacttcttgcgtcttcacatcttacttttgttttctgaaaaagagccacctctcctcctgttgatattttccgttggccctgagctttgtgcttcactctggttttcttgctttaaacaggtttttttaaaatcaagtttatcttcttacatttaaaaaaaatcactttatgtgttggcttctttcatgtagccttaaagtatgttcaagtctgattgacctgaattttattatgtgtggagacaaaagtctgcaaaagtaatttaaactatttttattagagtgctccttgatccttaatcaggccagcccttgaaaatacgatttctgctctcgtcatccacttctctcttctagctgcaatggtcattgacgagctcatgtaccctgattactattgatcccattgaacctatctcaaactgtcactgttgacctctctctctcattcttaaaattctcacatcaattgatgtgagattttctctcttttctagttcttcttttctttctctttgactgttctttctctttatttggtgcttttctttccatgtcagttaaatttgtgttctccatggttctctctttgttctctctttctgctttcctctaacgcttgaaaacactgaaaaaatacatattatacaaatgtaccctgtttccctctttctctctgtacagacacacatagtgattattaaaatgcaaactcacttcaacatactgctgatttacagtcgcatttcctccctatgaatttccttagttatcggatcaaatattagcaataaaactactgttatctgtgattatgatcaatttcaaattttgaaatttatcttcgtgatcaaaatagtggtaaccattcatttgggacataaagttatttaatacctgatttctacctacatttcttgttaaattttgccaaactccttatgctcttcagtgccctgtctccacaccttgtctctcttcaaccagaaatgcttttgtttttacaactcctatatccttgcgtatccagtatgcatatacagtatttaggactctcatttagaagtaacaaaattgaagtaactaaagcaaaacaaatgagagagaaaggtttttcatatggaaacaggaatgtgtcatagaatccaagggcagtaataaagttttgactcaagaagggactaatgcctgtgttttggttatttatgatagccatttattattcccactaatggttttgcgtgttgagaaagctcacctggatggttctcttttgtggtttcttatgtgattttagtccattgttgtctgatactatagtaacctgaatgctcaactgggctgaacgtccaagatcactcattcacatgcctagcagttgttggctgaaagccttgttgtgattgttgctgaagcacttatccatggcctttcgatgttacttagctttctcagagcataatatgttggatggattctaaaagggagcaccctaagaatgactgttctaaaaagatagacgtggaagctgccaggccacttaaggacttttgccataactggcacttggactatattctattggtcaaagcagtcaaagagtcaacccagatttaaagagctgaagaaataaacttcacctcttgttgagggagtggtaagaggagcatgtgctgtgggagctattattgcagccctctttcgaaaatgctatctacgggctgggcacggtggctcacacctgtaatcccagcactttgggaagccgaggcaggtggatcacctgaggtcaggcattcgagaccatcctgaccaacatggtaaaaccctgtcgctactaaaaaatataaaaattagctgagcatggtggtgggcacctgtaatcgcagctacttggttggctgaggcaggagaatcgcttgaacctgggaggcggaggttgcagtgagccaagatcgtgctattgcgttccagcctgggtgacagagcgagattccatctcaaaacataaataactaactaaataaataaataaagccataccgcattggaagccatcagtgtttttgttaccacctcactccctatgcatctacttctttcttctctctctgttcatggacctttgctcttcctcaatccactctgcaaactagggacttcgtaagcacaatttgctagtatatgtgacacaattcgaagcactcacagtttgaccagactcttctgtcaattctaattttctgagagagattctgatgattctctcttaacacaagcattgtgtgtattctgatcacccataacatggagttggccagaattacgtggcacagacatggttgttactggcccacctttttgaggaggattaacatttccaagatgaaaggccctagccataacccctctaaagcatctgttactcccagcaatgcttactaattattgaaagttctactttaacatcaactcccttatgacatcctccgtacaagcatcactccaccctgcatacttccatccaattttatagattctgtgatgtttcttgctctataaataacgtcatgcacctagatggatccctactcccagattctaggttcacgaaacatatcaatatttctcacacaaggtagttattcaaccaatgaagatcatcgatatggtaataaaataagatacatttatatgcgtatttgctctcatttgttttaaggcagaattctaactatttaggtaattcataattgatttgcctctataattgttaggattaatattctaaggaataatattgaggtacatctgtgaatttataaccttgcataaggagctccttaaccacttagtccatgttcttggtataattctcattactcagttcagggctatagttcgctctggaaactgctaagcaaaactgatgttatcttctaatgatatgtatcagaatttactccaattggtgtaaattcacttacactaatatacgttatgcaaaatgatctgcatgataatgttatgggcactctggtataatttagtttctgctctaaattataataatctaataatgactgaattttaaattagaatgatttgaccgctagctgattttgtatggatttgacagaaataaataaataaatgtattgtgttcgtgtccacatgctgcagagatccctgcctataactggctcagaaattcatatgttaaatgcagaatatactttactatagaacttgatcgaaaatgtctttattgaatatataaatattgaaatgttttatagttatctaaaattcacaatcagtatctgccggaagccatcaaatatctatcagacaaatagcaatacctgtttggggcatttgacttccatttcttagattcatagcttccctgaaatttaactgaaatatggcacataatgactgagtagactacactaaggccaggcacagtggctcacgcctataatcacagctctgtgggaggctgagacaggagaattgcttaagaccaggagtttgggaccaggctgggtcacatagcaagactctgcctctacaaaataaaataaaataaaataaaaagaaggtaattaaggagtattttccacatgcaattttctcattatatctcatccctgtcacagttggctgaatcttacagattaacatcatgtctttggtccgatttgagtgtgacttcaaagataaaacatatcaattctacatataatatataaattacctattgaaaatgatatctgaaatagttgatattgactcaaaatgattattgcttttttcataataatcccatagggaagaaataaatcgtttcacttggataatttatgaaagtaaaaaatatttatgataattctatttaggtgatccacctgcctcgacctcccaaagtgctaggattacaggtgtgaaccaccactcttggccaatttacggtcattttaaaggaagctacatggtagaggtggttgaggagagtttctgaatttcgtcttcttggaaagttagttgttctttgtagagcatgctgactaataatgctatcctcccaacagaaaatccaatctgatttgacaagtcatgagatcagtttagaagaaatgaagaaacataatcaggggaaggaggctgcccaaagagtcctgtctcagattgatgttgcacaggtatatgttatttcagaaactaaggaacgtgttttcgttgggcattatactccagtctatattggacaacttgattattggcaagattggatttgaggacattatttgaaaactataatttgatgtctaaacaatgagtgttttgctctctacattttaaagataaaataggttaataaattaccttttatttagtataacattaagaaaaaactactgaatcattctcccaaatgtatgttttcctgtgttggatgaatggaaaaatactgctttattttgtttttatttttctgtatatcttcagaaataaaggcagatctatcaataaaaataggaccagttattgtttgaaaggcaaaattaaatcagtgcctttttacactgtccttacagaaaaaattacaagatgtctccatgaagtttcgattattccagaaaccagccaattttgagcagcgtctacaagaaagtaagatgattttagatgaagtgaagatgcacttgcctgcattggaaacaaagagtgtggaacaggaagtagtacagtcacagctaaatcattgtgtggtatgtatttctggtggcaaatacgcaggtaccccttgactttcctcattaagaagtaactgctcttttataagagagaattgttttcagataaccataataattatactatgtaattttaagattgagaacaaaaattggcacatgtattgtggcctattctgtgtgtcttttttgagtctataattctgctaagaactgtgcagaatataaaaggatgttgcttgtgtttaatttttatgattctttaaatatattttaaatggaaatctagaaaggaaatatattaatctaaaaatagtaacaacaacagtagttgcaataatcctaacaacttcagaaataatggatgccaggtaaactacgtgacatacagaagtcacctttaattcttaaggctacagattacctgagagaatttaaggacaaacagctggtgaatggcaaagcaagattccaattcaggtactcttattccaaactttaataactttcctttaaacaccagtactggatatacagtgaaatgcctcaagacaacaccgaattaaaaggcatggaaaggtacaaatagcctaaagtataaatctgatttaaactttataatattgaacggtgtcctatgttgctgttattggaaactcaccaactgagatgattcctctgaaaacaaagctgaggtatgattgcatctactcgagtaacataagtattattataactctacatgtactatcggccattagagtgggaagtcacataaaatgaaaacacagaatgttattaaagggaaaacaagtctatttagtacttgatattttaagtattgtttctacatctactccataatatcaatgaaaaacagagtccttcagatacatcgtagtcatatcatgaatggggaaatatttttctttttaacaaatatcttaaaataaatacatatatttatgtgtgaaaaatatgaggtattcttattcgataatatattttcataattcaagctgcattttagtggtataattactttaattattctcacccccaaaaagaaacttggaatagaaatgatagaaagtagttagttgatattagatgagtaaggataggaatatatgggaacatatcccatcttaaattttgccaaaaaaaaaaaaaaggaaagcataaatgacccaagtgccttattcatgactaatatttgcaaagtgagcacttttcgttcttttctagaaacaggtctctaatgttaccttataaaatgtatccaacagtaaatatgagctgaaaacaatctcacctgtgtcaagctgtgactgtgccctgcgtcagtacaaaggaaactgctcaaggcatttgctcaattggtttctggttctggtttaaatgtcaggaccaattgaagcagttctttcataagaatatccttacactgtttagttttttcattgtttacgatgctttgtggtgtataccataatcatagtcttgccttcaagacatgtttgtctatttataaaagtcttactttcatgaacacaaatataaataatatttctcccctttgtttataaatattttacttgcctattgaatgaaacaatgttaatggctaacggtaccttgagggaactttcttcatcaaaataaagcatttatattttttgaagttcagagagtaaataatttagaaaaatctctgattccaaattagcatcgttgatttccaacataataattaatttcagtgtttccagatacacagatatttttatatcttctaagaaaaaagtaaaatgaagtaaataatatcatctgggaaactcagacaaaagtcataattattagtgatgaaggaatgttaacatcatttgtcaaagaggattaatatggaaatatacatgtagcattgatcagataattgtccagcctttacaaaatgcttttttttagacattacttttaaactgaaaagagaaattaaacccaatttttgttctaattccataaaaacaattacctactgtcaggtttattttttggtaatactaaaataagtactgatagttcagatttatgactaaacaaattaaagcagagatacataatgtaaactattatatatacgtgtatacgtatatacacacacgtacatatatttgaatacatggccacatacatacaaagacatatatttctaggaaaactacaaagcaaaattaagacatcaagtggtgttggagtggtgttggtggtataattgtgaacatagctgtcttccaaagttatgacacttgtcttatgatgcttttttatagcaacctatgttttgtgaaaccgtatgtgtgtgctttatatttgtgatgtacatgtgaattgtcaataatatttttatatctggttttcatcagcacttttaagaaaataaagttgtgtaatttaattaacattgaaaaggaccttactttcttatatatgatacaatatatattgaaattatgatgtagaaatttaggtgctttaatgttactaatatgtaagtaccatgagaacaatagtgaatgtgtgtgttttggccaccactgacttcccagtgattcaaatactatctgattgatagtaaccactcaataaatacccgatgtaggagtgaattaattcatccaaatttatggctagaattatataactccaacatttaaaatagaagtcatgtaaaattcagaattgacatttatgttctttgattgaagaactaaatatatatatatcacaaaacacatatatatgattaactctctgtttaataagaatagctgcaaatgacacatatatgcatgtgtgtagacaattagaaatattaaatcaacagaaaatgcaaaagctagatattgaccaccgctgcaaaatgctactctattaaaatttcaaacatggaatagcaattaaggggatctctatttatttctgttcataatattatgaaataatttaactctactgattatcatgttttgttttatgtttaaacttagaacttgtataaaagtctgagtgaagtgaagtctgaagtggaaatggtgataaagactggacgtcagattgtacagaaaaagcagacggaaaatcccaaagaacttgatgaaagagtaacagctttgaaattgcattataatgagctgggagcaaaggtgtgtgcatgctgagaccacaaacacttctttccactttccttataaattgtaaagcaacgggcaataaattatgtatgattagagtcttagcaattctaaacacctctctctctctatgtatatgtatacgtatatatatacacacatatacgtatatatatatatgtacacatatacacaaagataaacatatacacatatttcgatgtggaattctcattaagaaacaataattaatcagtgaggctctgcttattcagattgaaaaatacgtaacgctcagggaggtttttcctggtccatcagatagctctaaaagggtttcttagttgtaagtgttccttattttcattatatatatctacttgtgatgacttgaagactggtaaatattataaactgtatctatttatatgtaggtctaatgttgttaacatattccacagagaccacattaagtttaaaaattacacagtaattatttccctatatggccaagacttgcaaaatctaccacacttggctaataagatagcatggatagccagttaagacctacgtctctgtaattatttttgtatcattgtcctgatcagagtctcatgaccagctccacttcactgctaattcaagatgcctatatctctccatctcacttcgctcaactcaaatattctgtatagattatgatagtaagtagtctcttcactctgttgattgtttgttttgctgagcagaagctttttaggttgatgcgataacagtcgtctagttttcctcttgttgcctgtgctttgggagtcagatccaaaaaaaatgtttgcccagaacaatgtcaggaagctttttcctgttttcttcaaatcattttataggttcaggttttaagtcttgagtccattttgaactggttttttatatgctgtgagataagtgtccaattgcattttcatgcatttggatatccaatttctcagaaccatttattgaagagaatgtccttttttcattgtgtattctcggccccttggttgatcagttgatcataaatatgtggatttattattgggctctctattctgttcctttggtctatatgtctgtttttatactaccatcctgctcttttaattactagagcattatagaatatttttgaatcaggtaattatgatacctccagcttcgttcttttggcttaagattgctttggctattctgggtcttttgttgttcaaaatgaaatttgggattctttcttctacatctgccaaaaatgtcactggaattttaatagggattgcattaagtctgtaaattgctttgagtggtacagacatcttaacaatattatttattccaatccatgaatatgggatatctttccataaacggatatcttagtatttccaaaaatggacttctaacattttaatttcgttctgactgaaagaactgaatttcttggaggataaaaagttatatttttacaactcaggttctcaactttagtgaatagaacaacatcactgataaaattgtcacctcatcttagacagaaatatgaatgtccatgtttgagaaatagctaaggagaggcatatttcttgcatctcagcctgaaagtagattgaaggttatatcttcaagatattagttgccaattccttaccatagaaagtaaattttataattaagttgaaatctggaagtaatcatttttcttagatagtcttgtttttatattttaaaaaccctctaattaatatttgttatgttttaaacaagtttgttgccatcctatgacaaaagattctcctactttgtttcaaaataagaaacactgatactcaattgatgggaaagcattatgataatcttgaaataaaatacatttcaactgttcatttggtctaccaaggtacctttggaatgagatacctttatatcctctagagaaatttatcattgtttaaagatcaccacagacagaaaaattgtatctgcacttgataccttattccggtgcttatcaatttttatagatgccaattatttcatatttaacatcaattacgaaggactgagtaatctctagtctcaaatgtattagagattgaataatctctaatattaatcctaatgctacagcttcagttctggagatatattgtttttgtaattataaattttaaattaataaaatgaatgtatgttatagttataaattacaaattttcagtttataatttgacctgtgtgactttatactaaaataatgtatggatgagtattttttaaattaagaaaatatatgttttggtaaaggggagtttctcagtttactttttaaaatagaggttttttgtgtgtgggctttttatttgtcataggaatttttacgaaatcattgcaagagtaaatttaacataaaataacagaataaatcaattagaatttaaagcaatgaaagtgacattagacgaataatagtgccctgagttgattattattcagaaatgaatgattctcgtaatgatgtcaaaccctatttattcctgaaaatacatatctgagagcttgtgtttattctaaccatttgccacatagtaatatccttaaagcaaaataaaagtgtatgaagaaatcatatttaactttaatagtatcacagaatacagcaaaaacataggccaaacatttatttttgaagtaaatattgatgtagaaacatttgtgactaagggatcatgtataaataccatcttataaaaatgctgtaagtcctatattctttgcctgagaataaaaatattgtctggattttgactcaaaatattttcaacagcagtagctttgtctaatgaaagcaaaggcaacaaaggaaatgttattacattattctttttatgtaagaaggaacccttctattttaaccatcttcagaatttatatggttgtgtctgccacaattgagtatgcattacctttttggagtaatcagctctggctgccataacacaataaaataaactaggtaaattgatttctgcaagtgtggagtctgggagtgcaagatcaaggtgctgatccatttcattcctgaggagagctttcttcttgtcttacctttttgctgtattcttacatggtgatgagtggggagagaaaatataattaatttattaagagatattaaagctggcaccattgatgtaataatacctataacccctttttatttctctatgctctgatttttatggaaatttacataaatagcaatactaatatcatcccttaaatacattgttaacttcgtgaaacaatgactactaaaacattttactgcaggtggcattgtgttaaacgtatccattcctcgcatacacacacaaagtataaaactcaattttccttaagatggcagtgtctcctgttttttaaaaatgtatttagctggaaataaacaaaatgaaataaataaaaatcaatactgcattagctctgggaagatagaatttctttgaaatattgaatctggaatcatttttctaccaataatgcataggaaaaatatgcatagaaacacaccataaagtatattttccctcaccccccacacacccctacaacacaaaattcttgcagtcaaaagggcagatgcttttacttaggaaaaaaaaaaatagaagggaaaatctgtttaaaaaatgaatttacagcctcagcaactaaatgttttctaaatgtacgcacacctctcctaaagaaaataaggaattttattatttggaattggaattgttatcaaggttccagaatatttatttcgattgtagcattttagatgctttatacatatttttatcttttgtgtttttcttgcttatagatagattcttattttggttgtacacacacatacacatagacacacacacacatatatatgacataaatatatgtatcagtcagtggtgcctattgggcttagggcataatgcacaaataacgcacttgtggtggtggtattgttttaaccaattccattacaattgaaattaatctggagtctacctttcagatttcttagcaacaaaagccaaatcttgtccatgttttatttacctgtaaggtagtaaaataaatgtaaataaagcttttgctctatacattcaggcacagttttttattgaaccatccctaaaggtaaataatgagaataaaggaagggattgaggtggtacaatatgtcatgctctctcaaactgttgtctgcctttaccctcgcaatattcctgtgttctattaataagtatagtaatcccatttgacagatgtgttgagaaaaatgaggtgttctgccaaaaatcatactcaagtcgagagtccactacgtatcgcagagcctaacatacttacattccatcatgctgtttctgcagagccaaatatttatatctattgttcagattcccaggcttcatgacagacaagggttttttttaaaaaaaggtgaaaacacataccaaagaaaagaaaaccaggagcaacttgtaagagtataaactctttatgtaaattctaccagttatattttctaacttgtaattaacgatttgcaagtcttcattcattcctttattcaatacataaagcatatttagtgagacctttctttgttcaaggaactttcaggagtagagaggagtaatctaaagatgtgtgaggcaagaagatttgcctttaagaaattgtaatttatctggcttttgttgatgatttgactgcctttagtagaaagagatgctgggatttttattaaaccaaccaactgaaaatcttaacaaaatataggcacatctgagaaggtggtggagaaatacagatttgttcatttcttatgtgagaatatggataatttgcttttgagggtgttggtatcaaacactgagaacaggagcacaggatcaagtaattagtttttctattaatgggaatgaatattgtcttcacattcatctttttgtccctattggatggcaaaattatgtttaaggaggaagtgacctattcactgtattgtttttgagcagatgtgagacactttaaagatgtaacgaggatacagttgagaattctaggtattacacaaatacttttaccttttgagagaattaatcttctatcttcattttgattccttaccagcatgagctagtctcacttgtatatagaggattgtaaaccttcttgccatattattgacacatgacagtaagttttcagtgagaaatgagttttatcttcagtttgacttatatcattgtatttatcataaactttggctataaattatcttagagaaaaattcgtataggtttcttttctaccatgacgacatacaagaccctatcttttggacaaacgatgtcatctgccctagacagtttttattcactcttaatattcagaatatatgatttttataaaatattattttaaaacgtgtaagaaaatagttattttaaataacagaaatataaaagttccaaataagtggttataacgaaatttgaattaaagagtaaactaaattacatttcattataattcttttcaggtaacagaaagaaagcaacagttggagaaatgcttgaaattgtcccgtaagatgcgaaaggaaatgaatgtcttgacagaatggctggcagctacagatatggaattgacaaagagatcagcagttgaaggaatgcctagtaatttggattctgaagttgcctggggaaaggtaaaacctatatcactgaaggttattttgaacatacgtgaaaacacataatatgattttgtaaggaagtattaacatgtagcaataatagcattataaatattaatattgtttcatattccctttcttaaaaattaatctgtgcttttcaggaccatgataaaaccaatggtaagctttagcaggagtctctccaaaagcttccttagagttcagtaaattatgaataagaccttaagaaatacataggtcattagtctgaaaattggtccagagatgagatcctataatgtactggcttgcctaagaccatactgcccagatgaatcccacagccatgaagagggcaaggacacagagattgaagacagttgggctggacaggacttgcaagattagcatattgccaaagtcgcatttcagaaagaatctcaaggtgtctatgcaggggctatcatttccatcaccaaatgacacagcgactcctgtaatcattagccgttaaattcttgccctttctctgatggccaatcatttcatgctgcttagaacttagtcaagagactcatagcttagtatttttttttttactgtttattcattaccagattacctgaaagtgtgttgatataaagaaaatagctgatattgataacatgttttacctcaaaatttgccactgtgttaggccatttacacccacttaatgttttaaagttaccaaattaactagatgtataagacgtttatactttatttttaattcaatgtggctatccagattattcaaagttgggaaattttcaataccttatgtaaaaacttacaatcgtataaatgagacccaaactgaaaactgtctttatgtagattcagagaacaagtagtaatatattttgttacataaaatatttccaaataaatagtagggaattaaattgtttttcttctctttcagaataaatgtaatgttagataagatattgaattatagttattcaggatcatacatgagattactatagcaaggaagatacagtatatacaggttaaaactcacattagccttattttttcttatcattcaaacatattacttgaggtatttttgcattagcctcaccatgaaatcattcaaatgttataaggtaatgacctttgcagaggtttctaggttatccttctcatatagaaggcttgaatagtctggagaattgtctgcttgttgaatctgcctggaaagtatttttcataacgtcaaggagcaaagctactgtgagatctagtaggaaaaaaaaaaagcttagaaaactggcatttattttctttctttatagaataaagataatttatcactctatctagatcttttcaaacactaagctgttaatgacatactctaaaatctcttagttgtcaaataaagtatattcatttgcatctgaattacagaacttttttttttttttaccaatttatttggaaggttctcattatttctttaaaaataacaatcataaaagaatatatgccctgcagatctaagccagtcacatttatgataatcattctaatattttaacataaaattcaaactctcatatatgaaaccccgtgactattgagtacattctcatttctcatggtttcttggtaggtggagagcttaattcaagctataagtttcatctgctgtttcaaaagataaatgtcacatttttaaaaactaaattaaattcatttaaatgcaatacattaaatgtagttgccgatcattccaagtatttggaatgtgactgcagcaaatttgaatatctagagtcaatttcttttttattattttaaaaaatttttagacaatttaatttatatctgctgaatttctcccagttctgttgacccaagaacattatatttattttcgtatgaaagtatttgaacatctagtttcaaatattcaaatacataaaaatgtcaattactcatgaagtgattttttgacctttagtttatccaaacaaagcataatttcaagtacattgactatagttaaatagtatcagttttatcttaaagtatcttaattatatttaatatatattaaattccagaaaaattatttagtgtggcttgaagagatacatatggcacaacttgagaagcctaaataaattggaaaactaggaaaaggaaaattatagtagataaataataaaaaattcttgcatagaaatatatccacaatgtatcatgggtggtggaatggacagggaacattttaaagccacaaattggcgccaagcttcctaaaagacaaaaccaagaagtaaacatatttttgagacccaaagtttccaaattattaaaataataattaaaataattttaactttactagtagtatgttagctttttgctagaacttagtgccagaagaaaataaatgggagggtcataaaggtgataacacgctgattcatattcttataataaacaataagaatgtttatttttttctaccaacatggctccatgaaaaagaaaaatttagtgctaaagggccattcaggaaaagcaattctatgagaggaaaaaatattggagcagaagtctaaagtagtctagcaattgttttcagattttcagattctctattttattaatttttaattttgtatggatacatactgggtgtatatatttatgaattataggagacatttttatacaggcatgcaatacgtaattgtcacatcatgtaaccttctgtgaatatgctttcctgcaactgagcttttaagtagaattagacatcagagatttgaaggttatttattttctctgaatacagaaaaaaattttctgtatctttttcctggaaagaagccagattgtttctaactgagaacacatttctatacttggccctatatctaattggaaagcagggcttcatattcatgtgtatgtcatagtactagaaggcttcaatagctaaaaatttttgctaacatagagttttgggtttgaaccagtcacagagaaattggctattgagccttttcgtgccaagcataattgaagaaagaaaactcaccatcgacaactcaaaatatgttgacttctctaggaacctgtatcaatctctcagtgaatgtatttatttgaaaacacagttgggctattactttagctgtaaaagctattgaaaataaagctcagtagtactctcttacttgatgatggcatttaaaaggtgaagtgagaatgttttatagggggcatgaagtatcaagtactgagtgtgatgaaaattaatatactggttaatgataatactgagtctaaatgtactagtttttcctgtgatatgagaaaactagaattcacttttcaagatcaaaattagcaaagaatttggaagtattgctccaattggagaatcagaagtcaccttaaaaacaatacagattttactaatctatagtaatatatatttcataaagtcttcatgtgacacaaaagttttagggttttggtttttaactagccgtgttatataatcgaggaaatttcctatcctaaattagaaaagtataagcatatttaaagttcaattcagtttttcttacattacgaagctgagaaaaatgaatctaacattaaaatcaaaagcaatctggtctggcttactgtattcatgtcaccaatgcggtttatcaaaaatccctgtcatatcaaatcaagcccttccacaatgatctaacacttaagtttttatgagaaaaaaaaaaaattggattctctatactcatttcacctccttaccgtggctgtgggcaggccccagatgatgcattgtctataatataaactatgttggtgaccaccaaagcagccaggcattcttgctgttccttcatttcttactagattatgttatttaattaatttaatagtatttcatcgcctatttatagggccatagtccatgtgcaagcagttttccagtaccaccaaaattctcaataaggtcccatcacaactatcatttaggcctaccataaaatacacagaattaataaaatgagacaaccatcattgtgtgagcaatacttaagtcagccccatgcaccttcagagaggtactactagcattgagatgaattattccaacttgtagggaaaccaaatagataccgaaagaaagagtttattcttatttatttattttgagatggagtcttgctcttgtcaccgatcctggagtgcaatggcccgatctcggctcactgcaacctcctgggttcaagcagttctcctgccccagcctcccgggtagctgggattacagacacctgccaccataccctgctaattttttgtgttttcggtagagttggagtttcaccatgatggtcaggctggtctcgaactcctgacctcaggtcatccacctgcctcggcctcccaaagtgctgggattacaggtgtgagtcaccacacccggccagaagagtttcttacactggccaaaagatcagttatgttctttataaacttggcataggcttagggggcaattcaccatttgttttctaatgctgtgccctttaaaaaggaaggggaaggttgcctaaaacgatgaaagagatgttataaaaatcaagcttcttgagaaatatagtaaaattggaaacaccttaaatgttgcagtgtgttaccatttacacaaaggataaaatatgtagaaatatacattatttagttatatataatatatagtaaaagcagaaagatgtttgggaattaatataaactgaatacagaacaagagctatctctgtgaggaaagacaaaagaattgggtgggatatgaacaggacacttaaatgatacttgtaatatttcattccttaagatgagttatgcatacagaagtaatgattacatttggtatactttctgtgtgtctaaaatcacatataagaacataagaaaacatacaaaagcaaatgcttgggatttttccttttggaaactccactagccaggttctgtaagataacgcttagtaattaaggaacacccacttcgtgagtattattggtttcaaaagagcatggccactgttcattcggtttgcctaagcattggccaaagattctcctgctgattgagcaacaggacaggaacctagcagattaattccagcgagatgaataaggaacattgtctttccagtttttaaagaggatgtttctgtggctttttttttctttattatctacattgaagcatgatcgacagattcttatcaatgatttccttgtgaaagcagagtcaagggaatgaatagcgcaaaccgagaactgagaattttcatcaaagtggaaccaaaagttagcctgtgtatggtcagtttgtgtggcagcagtgctgttctatccttaagaacacttctattcagagagaatcgttattagagaggacagatctgtaagtcactgggtgaggtaacatcagaactgaaggtcctctgaaaatgatcttatttccctttttgtaaacaagaaaactgtgcaaaaagctccatatccctttctctgtttctcgattactttctttttaaaattactttagattcaggggttacatgtgcaagtttgttacatgggtgtattgtgtaacaattctaaaattcatatggaaccaagaaagggcctgaacagctaaagcaatcctaagccaaaagaacaaagttgagggcattacattgccccacttaaaatatactacaaagctgtagtaacgcaaacagcataatactattacagatatagacacctagatcaatggaacagaatagagaactcagaaataaagctgcacacctacaaccaactgatttttgacaaagttggcaaaaataagcaacagagaagggacaccttattcattaaatattgctaggatagctggctagccatatatagaggaatgaacctggacccctacctttcaccatatacaaaaattaactcaagatggattaaagtcttaaatgtaagccctgaaactactaaaaatcctagaataaaacctaggaaaagttcttctggacactggcttaggcaaagaatttatgaccaagacctcaatgacaaatgcaacaaaaacaaaaattgacaaatgagagttaattaaattaaagcttctgtacagaaaaagaaacaatcaacacagtaaacagataacctcctgaatgggagaaaatatttgcaaactttgcatctgacaaaagaataatatccagaatctataaggaacttaaacttgtcaacaagaaattaaaaaaaaacagattaaaaacaggacaaagaacgtgaatagacactcctcgaaagaagacatacaagcggccaatgagcatattaaaaaatcttcaatatcactaatcatcagagagatgccaattaaaccctaaataagataccatctcacaccagtctgaatggcttttgttaaaaagtcagaaaataacggatgttgattgctttcatagggtgaccatgattacatttgtaatagtcattcactcctaaggatttcaaagtcatgtgggtccaggatcctcaatatgaggattaatgttaccatgggaaccatgaaaagagctgacctaataggggccatatcaattctagccaacttcttgagcttcctaatagagaagaatgcctaagagactctctcaccaagaggaaggcaaattaactagtcagataaatgagagcagagatgggcaaactataattggtaggcctaatccattcagccaccttcttttgtacagcccatgggctgaaaattgtttttatgtaaatggttggaaaaaatcaaaagaagaactagatacttcaggacacataaaaattattaaaaatgcatatgtcagtgtctgtacataagactattgaagtgtatcaatttatatttgtttattttttctggctgcttttgtgctaaaacagcagagttgagtaattgtgacagagactgcatggctcacaaagcctagaacaactactatgtggccattcacagaacatattcaaactcctgaactagaggaaagctaatatagaagcagcaccctgtttgaccatagaattttgccatgtcttcttcttgaatgagtatcagaggtttgacatttctgggatccttttgataggccagtggcgttgtagaattggtctttcctaaatagaatgattcatctaagttttcttcctgctcagaattaaatagtaacatattccaaaccatagatactagaatgcatagcccttccaaaagatactgggtggtgcgtgacacaatttaagatgtttaaagataccatctacttgaagagaattacgaactcaagaatgtcttaggtattctaattcttaatgatcccacagagaaagaatgggagaacttccagaagtagtgaggatgtggtcaggggtgattaactgaagggacagctgcaggtaagaaaactgtcctgtgtccccttaccctgtgaccatgtttccaaattatagttacagaaaaaaagaatatattttaaaagtattccaaattgtttaaaaggtaaagaaaaatttttaaattaaaatgacaggaggaaagccatttgagaatattaacaaatgagataaaagattgatgatgaaaattgacaatttaaattattaatgctaattgcaacttcctacagcgacatagccctttcactgtatttttaaattcacccttcaatcagagtagtattaaagagggtaaaattaatgttaagtttttaaaaatatggatcaatcctagctagctgcatggtccagacaacagcaatgccacgaggcagccatcacagtgatatttatcaccccataaatgttcagatacttttccttttctgttaatggaattttctaggctgaggtgacaaacactgatagctgtagaatagagatgatggaaggaaatggcaaggcaatctacaggagattactagcacctgaagagtttgaatactggaactgcacaagttccttgagctttcatgataacccctactctcttggactgttatgtaggcaatagtaattcattcagcaaaaggacagggaaaatgtgtattttggtctctgatatttcccatgtacataagatattgcctgacacataggacatactcatgaaatatctgtttaaacgtaacttgcaaattaagagttgcaaattataatgacaaagcagttcttgagagaagagaaaaatgctgatttacatttaaaattgtacaagttttataacaaacataaataatcacctgatcaaatgttcccgttttatagatgaacaaatacaagtcctggtacatagcaaaactgtaatactatgcctgatttcaacagttttttccactataccaaattatcataagaagtcttattttctagtaattttaaagtaatctaagcttaaaataacaaaaagctacttattcacaataagcatgaaacaaaccatggctaaatttcaagtgcagaaaatataagtcctcattaaaataataaaatgaaaacccgtgtgtatctatcacctactacagtctgtagtctgtccccactgttgtgattttagatttcaaatattgtttgttagtatcttaatatcactctgattagttgagtgtaagtaaatcaatctgaacatcccattactggccaatattgtttagcatatgaattgatcacgaaaacataaccataggaaagtaaatatgtatgtgattaattagaggtttacttccctgaagatcattatgtttgggaaatacaagctttgacaaagtctaatctatatgattttctgatttaatcactaacattttatttctaattttgttttaagcatcaaagattccaactcagttaaataatttagttccattaaacccctaaatatccatggtgtcatctgaaagttcaaatggtagaataagattttctggaaaaaaaaaatttggtcctatagtatgttcatcctaccgcctgttttattaacagtagtcttagtatgccaagagttgcctgagaggaacacacacaaacacacacgcacacaaatggtattaataaatttaactgaaggtgttaaatgcagaataatctatgtctaaatagccacttgtttaacaaattaccgtgtttttcacgtttattttggaaacaaagttttataatatttaacctcaggaagaacaaacattggttgctcaattatcctttggctttcagttcactcttagaatttaatgactatcactcaataaaaactcagaatgcatctttctgtttgcctgtggttttcaacattggttgcacatcaaaatcacccgagaaacttgaaaagtatcccaatgtttggggcccacttccagagattctgatttaattggtctaactctaactagctctcttattcagcaaagttgagaatcactagataatgtgatacaagatccgcgaatttcaagctgtctgacgagagcctaaattcagctcagtcaaccatgtcttgtatatatattttttataacagtaagatttcacagtttaaagagatctggtttctggtcctagattatctggataactgcctcaactcatcattcctcttagctataaaaatataagaactattacttactctaaagtctgttatactctcattcccctgaaaaattacgtatcttttttttttaaagtgagcagagtaatttatctgtgaagtgaaataacactagcagatcattaacttggtgcaatgaatgcatcaagcagctgttacttagaaaatagaacatctgttacatgccattggagtcactattcactgtcattatagttagagctgttatttctgttcagttcattctgctttcatgaaattcttctttaataaacaatacagtgttattaaaaagtcaatacacattgctatagaatccactatttaatgctttatgttctttttgaatgtatcattatattattctgtcacattagcctaatagtaaaatatgtcctaaacctctagccatgatagagtaattttgggggctgtaaaagcaattagcatctcatttcctcatgtttaagacatgttagattgtgtgatgcaccattgatatgattacagctgctgagaatttaaaaaaaaaaaaaaaaacactaccactttcaaggtaaaccttaattgtatgttacatctcaatttccgaatccttaaaatgtgacaaatgcacatcttagaattgcagtaatatggcaatgtattccttttctttccacgaatatgttacgtagctaaaaggtgaaagaaccctctcctgttctctgtgatcagaaatggtataatatttgcaaatactaagtgcagaattcacctgggtagggggacttctcaagatgccttttatggatgctttagttagccttttattcatattacagggaacatgagtaagagaaaggaatagctaaaataagtctgaatttaattgagtcctagtaaagggaggaatctataaggaaatgatgttaaggtacgtaggtaaataaatgtggtgctgattgaagataagctctagagaacaggagactcttaagataataaaatttgtttaaaaagagggggtggaaaaaagagatcagacagagaagttatcttaagaatataagtccctgagaaattccaagaaaatctgtggaaggtactggaaaacttgtgaaaatacgaaatgggtggaggagagaatagaggttaagtgagctacatttctttacccctgaagggaaatgtttgtaaaggtgttcctataggaccagatgatttttccaataatttttaccgttctaccattaaataaaaataatgaaaaatgctgatggtataatcagcagagaccaatggagaaggtttttccatcttgctactgtatcagtgaagtgagccgatagctgaaccctgaaccgaacatgcctttttaaatttctacaagcaattatacttgtagatatggggaatgaatcagaatgtattcttcatccttcccatcaacatggggcatgacttcactggaagaaattaactcattatactcattcttttataataaggaaattagagtagcatttacaaattatggctaagaagtagacagcaaatttgtttgaaatcatggaagttagtgcttagtatttggactatttatactggagctatcaaatgttacaaagtaacatatggaaaataatatgttagacattgtgagaatttatagtttaattggattttacttatgtcagatattttcccctctatcataaaaacccttagtgccaagtatatagtttgcgttcaccttctcttgaatctcctgaaggtggacttacaatcatgtcataggtcaagttaaaactgagtgtacacaatcttgctttttcttcagccctaaaatcgatcctagcagcaatcacattactacatgactgaaaaacctaaagtgtctgagttataatttagtgaatttagtcattgaatttgaacttgctccttcagaagagtagatcttctagaaccctctccacttctcacctcacaaggcagaagaaggcatgtatgctgagaatcggatgcttttgaaaaggaggaaatgccatatcttttcagctgtttctttccatctcgccaaccctataaataaggagctccctttgagaggaatgagtacaggtataaagacaatggccaaggcaatagctctaggttggttctccatacatctgaagatgcagacattcttgtgttgtgggaaactattagagccagagaaaatggttcgtcaacaacctcatcaaatgtattcttttagtttacagtaagaattccctgttcctctatggcagccttgtattctaactttcataccttctcgttgcttcgtactttgtctttagtcaatccaaaccatcccatgcacactccgccttcaagtgtcacctttcccttgtagtcattcatgcttattccagccatggctcatctgtttccaaaaaaaaatgtgatttttttctagtatgatatcaaattgttttattgcatttaagctttcctctgcagctacactgtaggcatgattagagtgaggtttgcaaagattacctcattcctcatctctggcagtgaatagcacagtacagactggatattaggcacctgatatacattggtcaattagtatttcagatctccagaaagcaagctcagcatagtatttaaaggctaagtcttatttaagtcttatttcttaagtcatatctttgattaaaaacacatttgagggaaaaatttaaggcctactaaattaacacaatattttttcctaacccaaaacagcatgtatacaaatgattgaatactggttccttattgttgaatagcatacataaaagtttaactctaggtctctttttttacagagtgtaaattgtcctgtgaatcacttttgaccattagcagttataaaccaccatcatatcactgcttttttcaaatacaagttgataatggtgataaattgaacatcttttagttttaatttataattttgtggaacttaagaaggcactagaaattagtccacatttcctattttgttcccatcaactgaacatcactggacattgtttaaattagctggaggaatttggccagatgttgacacataatggtttctgtgacccaggaactacctgcaacattatcccctaagttcaaaacttttgtgatctcttctgagttttggaaaattccattgcctttaattgcattgcttgtcatgtaagaaacaaaatctatgtacacaataactttttacattgatgctaaaatatagtgtcatctttatgaagacttattaagagataattagtaatccaaatataaattaagcttcaactttgtgaagggttacctttgtgaataaatcaactacagcgagatgccagtagactggaatatagaaagtagataattctcatttgcgtatatgtccatctctttgacaaactcatacttggatataagtttttgaaggatggggacttctctaccgttttatcccacagagcctagtaacaatggctaacatctatggttgtagaggttgtatactacaaaaggttgaagtcaaagtattaaaaggaataaaatctagtctatgtctactctgaagttaagctctaaagggtctgtatctacccaaatgagagacttctaataatctcccagaatatattgaggagaattacatatgattctgctacagtagtaactggcatataataggagctcaggcaacacttacgattgataaatgaagaaattgcttttatgaattgctaagctcacctgtgtgcaacaaatagcacctacatatgaagaaccccatgcatgatagctgtcgagttcatctggcattaagtaccttaatttcaggcatgtttttattgaaaaaatgtgacataaaaccatatcttagaattgaagaaacagtgtttttgtcttgcataaaaatttttatacattgtttcctcatttatttctcctgtttatccgatgccaaaggcaaaaccaaaacagaaagtatgagaagtgatttcgagtggaccaggaccttatggcgtggcagaaagacagccacaggactacttaggtatattataaagatagaaaagacatgttgagagtgactctatgaggccagcctatacctaatttcttactcttgtactgtaatttttttcttaagaaattagatgtaggctggcattacagagctgctccttgtgtgtttattaattgattatttgtatctggactttctccactttcctgttattgctgtttctcaatgattttgttttgctttggctttctgtgattaagacatcagctccactcgcaaatagcttttcaactcgagtgccaatcacagtctctgtatctgttaaccttattgagaaaggagaaaaagggtctgttgggctctggctcagctctctgtgaatgtcccacagctggctaactagacaggcagggaaagaaccaggcacagactcagtggaatgccgagtggccacattgtctgtcagccgtgccatgtaccaggaaaggggctttatgcagggcaggtagtaaacctttgtactaagatcactttttccatcactactctctatcttttttcatgttaaatgtgattgttttcatgttttataaatcacctcttaggaaatagtggtattctcttaggagattttagtctagggtatgtggatagaaataaggtctgtgaacttggattgggggaaaactttatctttatttgtattcaattaaaaccaaaagtaagcagttttttcagttaaaatgtgagcaacaaactccagcaatagagatacccatgactttgtcactaatagaaatgacagatacttttataacgtgttccagacattgtacatacttaaaaataccagttatgctcgtcatcactacattgaaattatcctaaagacctgatgctagatcttgttaattaacatattaggaaataaaacatgtattactacatcacaaatatttaaaaaatgtgttgcacattgtatttcagtataattgttttcatttaaaatcctatgtattttgttttatgcatttaaaagcattattatgagaatgggtttttaagcttcaacagatgccaaaaagatccatggcactaaaaggctaaaaaaatccctgctgcagaaatacagtagcaccatactgtagaattttctaagggcagtttcttatttgtggatggattttcaaatatctgcctttagccactacatgtataaattaaataaatataaatatatttagttgaacaatatgtatgtttattaaatatttataatgaaaaataagacatgaattatgcttatgtacatatatatgttcatagttacccaacaatgaagcttcagtatatatggtatggttttcatgattcattaatacatagttataggtttaaaaccttgcagaatcatagtaaccatacagaaagccgtttcataagcattaaatcttaagactacaagacattacttgaaggtcaatgctctccttttcacaggctactcaaaaagagattgagaaacagaaggtgcacctgaagagtatcacagaggtaggagaggccttgaaaacagttttgggcaagaaggagacgttggtggaagataaactcagtcttctgaatagtaactggatagctgtcacctcccgagcagaagagtggttaaatcttttgttggtaagagaaaaggctagaagcttttacacccttctctgtcacgagaaaaagatacataagtgaccagtaacaattctgtgtttgaaaatttctcaattctacgtatatgctggctcttaattcaatatctataacaatattttaatatatttttctttatatttacgcaatattctatatgaaaataccacttaaaactaatctcaatgaaactttattgttgtcttttaaacattttagaacataggaaaaattctttaagaatattgtctaaccaataatgccatggtatgtctctgtacaattaaggaataccagaaacacatggaaacttttgaccagaatgtggaccacatcacaaagtggatcattcaggctgacacacttttggatgaatcagagaaaaagaaaccccagcaaaaagaagacgtgcttaaggtagcaaataaaatatgaaaagtaatgtccaaattgtacaccagttacttcaatcatctttgtcctaaaagatactaaggacgtcttaataagagtaaaacaatcctttcttccttcctttatctttccctttttccttccttccccctttgaatggaaatgaatgattttgaagagttctgtaatctgactttctgttcaaatccatcactcagttaattatacccaatgtaaactccgttcagaaagatattccaagatttattttgaaatcatattgcaaatttctgcctttgtcaatggtggtactacattcttgtgtctaacacaaagaacaatctgacactatcattcatttagcccatctgaatgaacacctgaaatccagtcagctgatttttttgcctatgccatatccaaatcttggtaattagtcttaatgttgggcttatgtaaagctgaggttttcatttttaactacatgtaaactaggctttgggttctttcttttagtctcaaaactgactgttaggatgccctgtcttctttttcaaggggaacttaatcttttctttaaaaaatgattccgataaaagggtatgagaggtgtaatacgcaaatataccttatagacactacattgtttctatttgatgatgtctcttttcccaattaaataggtagagttgaattttaacagctctcttttcaataaacattttttattttgttttgctgcaatgtttgataaatttattgattagttgtttactatttaaagaaaactcaaaaattatgtttctttctatgcaatttatttttatgcctctgatattttccacagattacgatatacctttaatgaaaaactataaattcattccaggctatccccaaaacacatttatgccattgtctgaagcttattttgatgtggatctgtattgtgctcttcattatcccttgatgtatagtcagagatgtcatcttatggtgaatttccttcaaggctttttgaataatagggtctgagttatttaacttcaacctctgtgacccggcaggtcaggaagaacattcctcagtacctctgtatgtgacagaaaattcgtatgtgttagaaaatcactttttttcttatgacactcaatgtaataaagaggaacttgaaagtgctaggaaggaatagaaaagtgttcttcagctacctgacctcctgagcacatacttagttcattccacaactattaaattcagtaacgatataataaaataagactaaatagaatatattatgatagttgcaacaacatagttgggaaaacatccctgtccttcctcggactaaataaacattttaaatagacatgcatcaaacttaaggacggtgatctatttttctgaaatcacacgcattttcattttagtcctgttttatggaagttgtggttttatctccctttgtattttctgcatgtgcttgctctcattttcttactttctctctctctctttctcactcttctcgctcacttgctcactcgctctgtttggctctctttttctatcttgaccttcattaattactaacttcaagtcctatctcttgctcatggaatatagcgtttaaaggcagaactgaatgacatacgcccaaaggtggactctacacgtgaccaagcagcaaacttgatggcaaaccgcggtgaccactgcaggaaattagtagagccccaaatctcagagctcaaccatcgatttgcagccatttcacacagaattaagactggaaaggtaggaagatctactccaaggtggaaacttgtgctaaatggtctcttgcgaaggttgcgcagtactctgaaaggggcaagtagaccccacagcaaggttttcaaaaggaaaatgaatgccaaaatgtatttaaggaaattttaccactgattataatgggagataaacgccactcctccccgtctctgtctctctctgtctctctctgtctctttttctctctcatcttttgctgccatagatattctaggactgcattctatgctgcagtttacatacgtactttcaggggtcacctacagaaaaaaataacaaatagcatgctgaaggccaaaaaaataaataaaaccaaaagcacacaagtcatccatcaacataaagcactaccgataaattttgccaaaagcagtactgatacaatattgcttgtatgtaatgtggatcaaatatccaaaatgaggtcttgtacatcttctgcacggtctagggtgtttttttacctctttactggttgtgcaagtgtgtttgtttaacttgcttttgctagttgtagacactgtgacaaaattcattaggctataatgaaatgatcacgccatgaaaacaaatcattgcaaagcttacatatcctaatttttgtaattttatatgcctatttatattactgtttaagaagaaccagggaatatggaacttttgcgtgatagactttatatttgtgtatgatttgatgaagagaaagtcttatttaataagtagtttgcaaaaatgtataaatatagtgttatagaatttcagctctttgggaagatttgaaatgcaagtaattacctagaaatttatatactgtagtttgataaatttcaatatatatgatatgctttcaaacataaaaatgtatataaaatcaatatatgtatttaggtatatagataattgttagaaataatctgaaatgaaaaaaacattggagtatttatgagaaaatatgatgcagtatgtcaggtaagtattgattcctggaaaaatagaacattttcaaaaaatattttgatagatataagcaaccagtaatagcatggtttcacaattgctgcactttctaaggcattacagtgtctcatcatgttatataatagtacatatttaaagtagttttcaaaataagtgaaatgtgacatgataaattctaaatagtttagcttgtatgcatgagacacagttacccttcaaaattcaccttcccaaattaaaaagttgttagtttaccttaattcattgcaagttatttttaatagttaactacttagttctcttgtactctctctctccatacatagagaccttatatagttgacttttaaaaggctatattctctacatatggagagagacagcatgagagaacttagtagttaactgtcacaaatatatatatttgagtcagtcattattacctgcaaaaaaatgtgacaggctcttaaaattgattaaagttttgaaagaatgtattgttacttacaaagacaattgtttttacttctaaagatatcaatggcttatgtaataacaagacaatgaatggagatttatttcaatccttaaaaaatgctactacttcattactaagatatagacacacacacatgcacattttaataaatcactaagctatagaatatttaagagaaaataaggtattatctttggataaattgtgttacaagattgtggttcacagatattaaaaaatgggtagaatttgctctccaccacagatgtgacagacccagccaatacaagtttgtgaccaagacaagtttgtgagttttcatttcacattctgcatgaatttgtaagtatacttctggaaatcatgcataaagtgatccactctatgaacttcttttattttccctagaaacataaggcataagaaatttccagtgaatattcatttattattattattattattattattattttgtgtgtgtgtgtgtggtggagactctctctgttgcccaggctggagtgctgtggcataacctcagctcactgcaacctctgcctcctggaatcaagtgattctcctgcctcagcctcccaagtagctgggattacgggcgggcgccgtgacacctggctaatttttgtattttggcagagacggggtttcaccacgttggccaggctggtctggaactcctgacctcaagtgatcctcctgcctgggcctctcaaagtgctgggattacaagcgtgaaccactgtgcctggccccagattttcaattatatgttaattaacaaaataatcacatgtttgcttttcaaagtatttgtttttctctaaattagtaaaggcaactgagtgtaacaatgaccccattttagggctctgaagagataattatgctctattatcacgatgaaatgaaaaacacagaaataaagcatatctgacactttgcttatatattcattgcatcagctaatgggattgagcttccattgtgttagagattgtggtgagaagatacaagggtataaagatccttgcttaagaaatacatgttttcaaacagaaatgaatacttagtataatcataaaatatgtttaacactaattcatcttcatggggatgttcaaataatggtgagatgatctcggcagagagaacaatagatttagaaggtaatctcaccagagaaaacagtggatttagaagattgagatttaggcctaactttttcagtagtagccagaatatgtgatttttctgcatatccatttcattgtttgtaagatgaggaagttaaaatagactaacaatttttaaaagaaaacctatcctgcccaaaatattattatttaaaataaagtattaaatttaaatatttaatattaaaatcatattatttaaaattaaattaataaattggaaaataatagagttactagatgggggaaatatctgccattttatctttctccttcctatgattgaattcaggaagtataaattatgctcatagaacatggtttgaaatttctaaattagattagttcataaatccctgctcgttctaaaatttggctattcagtaatcttttgttgattacaataagaaattgaaaacatttaatgtcttgtgtgtgtttgctctggagtagggaagtgctgaagtgctggaggttttagggggtagcctttgatctcaaaatcaggtttctttatagtaggggttatacaggataatattaggttagaatatggcttttctatggttgagtctatgtctaagtttcatggaagagtaacctggggaaaaaaaatactatggtgataaaaaaagtagatttggattgaacacgggtaggtcatagactctttgtaatcagtaatttcagtatagcctttagaacataactctaaagagcccttgaatagagaaataacttatgctgaaaattcactggtgtctagatttactatttggtgaagaatacaaagtggggtactcccatgtctcctgccaggactgttcatgacaagaaattccgaagcccagaaagcagtgagtaaagggatcctcagttcagattggctgaggacttgactgtccaagtgcagctctctgtaatgttaattttggcctcagcaaggagcagtatggtgagagcaaaaagtccttaacttcaagacacaagacctgctttgagcactagctgagcacattactacttagtgattttggatatgcctctttacctctcagagcctcatttctagctacaaaataagggagatgatgcctgttttattttaatctaaagattgtaatgaggatcaaattatgtaatatatgtaaaaacatgcatttaaaatgtattaatcagtgtatagatatgaaatggttaaaaataattaatatcaatgggtatttccatcgttacgtatattacacttgaatggccgaatctggggggttgagacaaaaactgatggaaaaaaatgaaagaattgctgattttctgtggtctctgctgtaatcgactggagtcagaaaatcgtgtctttgctattttcatgacaaagaccagccttaaagataatgaagtggatgaatttaagaactactaaggagttatgtttgtcccacatacgccccttaaaatacataaaaatgctgccttttcccattttattaaggttacctaagagtatccaatgactttgaaaaaagcgtgttttttcgtaatctatgtgaaatcaatgtgaggaaatggcagttttaatggagaggatcagaattgcaacagtcaatcagagataatattagaaccctgagtaaattgacagaatcaatgaggagagactccttgtctcaactgtctctgttttagggcatcggagtatagtggcatggctgagggcaagtggataccatcgggaaaataaggtgataggagacaaaagtataggaaggggcatgggaagacaaaaataaactgattatttattcatattaattatgacagttctacccctctccatccctctagaagccaagttggagaaggggagtcagcaatttgggagagatgctagttgaggtatatctaaaagcactaatgagtgaagacttgagaaaagggattaatcaggatgaattctcaccaaccatatattattttccgataacagtgtttggtagtgagggggatctattgctaggtaaaatacgatggattcaaggagcttactgtttgatgatagggcaagatgtgttcatggatactagattgagagtgagtgcatggtaagtgagtttagcagtcactccagcaacacagaggaggtaacaattcggcataaacatatgagaaagcttaggagcatacagtgtgttcaatgaagagtgagttcctttagttttcagagtagagggcatggaagataaaacttagttgtggatgataaggctgaagattatggctagacacagtgtgaagaggtcatggacagccagactaatcattcatgcttaattcagtatgcaatgaagagttcttgatgtgctctgtgtgtgtgtgtgtgtgtgtgtgtgtgtgtgtgtgtgtatctgtgtatgcactgttgagaaattagtccagtgatagttgtgaggagaattccactgaataatgacatgaagttcgggagctattgcagtagtctagatgagatacactgatgacctcaaaaaaagggatagctatgggagtggaaaggaaatttcagtctagatcagtaaatcttttgtatgcacttgggtgaattgttaaaaccagtgtgctgggccccacactcagagcttctgactcactaggtctggagtggagcacaagagtttgcatttctaacatttttctaggtcagattgatgctgaaggtctagggaccacgcttagagaactgctgctgcggagatatttagaggtagcctagagttaagtcattacatacaaggacccaagaagatgatgaattcaaaaatgactccaaatttaactctgattgactaggaaagtctgcatataaattccaataataggcctggtgcggtggctcacgcctgtaatcccaacactttgggaggccgctgcaggcagatcacctgacgtcaggagttgaagatcaacctggccaacatggcaaatccccttctctactaaaaatacaaaaattagctgggcatggtggtgggcgcctgtaatcccagctacttgggaggctgaggagggaaattgtttgaacccgggaggcggaggttgcagtgagccgagatcgcaccactgcaccccagcctgggcgacagagtgagattccatctcaaaaataaaaattaaaaaaaatttcaataataaaatatgcatcaagttatatttttattgttgtaatacttagctgcaaaataattttgactaaacaaactttaggtgtgtcatattaataaaggcaattattttactttttacaaaatattatgtaatttctacataaaatttgcttagattgtatttttctagagatttagatatacttcactgttctaaggagctgaaatgttaaattatttattctgaaattgatactaaccagaaaaaagtgaaattattttctctgactttgatcctttactaagacttatttgctataggatatatctggcatatgttctttaatttccatataggccttgaaaattgctgctaaaattcatgtagcagtttctatatatatgtattacaactgtaatatgagatttggacaatcgggcatcaaatacttaaatattcattgtttgattgctgcaataattgtaaattaccaagtttttttttttttttttttttttttttacttccattcagtgtcagaagatataaaagtaatcattctttggataagagactttcacaagtttataggaggctgtgagagagtcagtgaccttcccatgtaatgtagaatatataagaaaaagaaacacatgattgggcctaatctatcttaaaatatggttctatgtgtggaaaataattaagcagtgatttaattattttggctctcctaaacttcggtgggaaataaatgatgcattttataaatgtgatctagaaggtccaatgaagatgtattggattgaaaatttttaattaaagcttaattttctgtagtcagatttatcaatgcaaatacattgatattttgcagtctctttctgatcgtattataacttaacacctatgatggaaaataatattgtatcttaattggaacagtattcttgctatatatattctttaaattttaatttttttaatttttgtaggtacattgtaggtatatagatattcatttttagtaaaattttctataaaaacatgaaaactgagatgaagacttgtaaatattgcataatttgtagagcattaaatatgtaatatttacaactaatatcttcaggtaatagtaacagatcactagtcaaactgtataatatctgcaaattttattttactaaaatgaatcagaaaaatatgaacctaacaacataattcttatgttagcttattttttccacatgtgtaattggttatccctataacaaggttaagtccattgaaacttcgctaataaatccctttggtaaccatgtaaaatatttttaaagtagatgtgtaattgagtttggtgagcagtgtcatttgataaaactatctgggtcttgttagcataacatttgaaataattaaagctatttggtgaatcttgattgttctcctttgataaaggaaaattagtcccctgatcagtgtcagtagatgtaaagcaattttgctttggaccagagactttcagatatttataggaggttgtgagagtgtcagtgagttgaccaagttctcacagttagacagtgtggttagcaaatactagatctcagtccattgctttgtccacttcaatacactgactcagcatagtttactgcctctatttatgtcataaagtagtttttgttggtctactatgtgttagtataaacatacccaatttcacttcaaatacagtgatttcgttatactttttgtattaaaaatgacaagaacaaaaggtggtagggaggaagaaatggaagaaggaagggggaatggaagaaataaaactggaaaacaacctaagtaaatgaaaagaaagtttaaaatacaaaattgcttaaagtgttatgtttttacttttgtctgtctcccccatacattttagagttaaatgttttcctcttttaattcatttcctactccaaaaagtcatgtaatcatgaaatagggcaatattctaagttaaactttataaaaggtcgacagtaggaagcagattcttgacccacgaatatattttgcatccagttttaaaatgtgtaagcatgaaattaacctcatccatacaaaatcaattgaaatctactgggtaatatcctctaattagcctcacaaattagtcacattttcacatttttattatcaaagcattaaaggtaaaccagtactttatctattctcaaaagaatgcaaccaatgaaatgtcactatttggagtcaatttatttaatttaaaaataatatttcttacattttcttgtttgctctaataattttaaaataatagaataaataagtttataaaccatattttaaataatctttcttctagcatagatgtagtatctttccaatacacttatttgtttttgtaagttcttttcctctacagatagaatgatgtgaaataactcttcatatcatatcagtagtctgtcttttctgtactatagtgtgttacttgtccttgaaatttttcatcttggtttccatgaattctttatttttctatatcaatattgtaatgataaataaattttcaaagctgcagaatggaaaaaggagactgatggatttgaagcaattttaaaccaatctgtagcacttggattatttattttcaatttaggttttagtgtgatttgaatatagtggtaatttatcatgattattaagattccatagtccagattaacaaatgtttacttgctgtctgtgtaaacacagtcgttattatgctagtgtatctgtgcatgccaaagtaatatttaaccaaggaaagcttacattttaaaactaataaagtgtatctgagtaattttgaatgctttcaatttacaatgaatcagtttgtaattgatcttgcttttcttcagtctgttatcctttgttaacttgttataaaattcagctttaatgccaaaacttcaacaaagccttaaatttcattaatccttaaataatccaacaaagcacaattaatagttgttaagcaatttgaaacattaaaaaatcaaggaaaacaaagtgttgtctttctcggtttctctgtctcttctttatgtgtccatttatccatttattatacttccctgtcttctaatttatatgtattttgtatgactgcacagtcatgctaaagctcttaaaatgaaaaggtaagtaaaaaattaaaagtgtccaaaacctatgcttggtatacactttctcatgcaatattataacttttgtttgattattttctatataactaaaacctattttgtgtgcactgtctaacattgtgtgatttaattgtgattccagttcttttgtggtcatctatttcctttaaagtcaatagaagtaacttacccaataattaagatgatttatcagccattgctttcaactgttttagacaatttatcataattctgaattgaaaagcaggcatgatatactttgtgttttaaaatttggtgactcaagaatgagctgttaaattataaacgctttcttattacatgtttcctttataaagttgcataagaattccaagttacaaagacagggaagaccaaggaatgacatgtagaattttaattgggtgggaaagtgttttctgttttagaatgggcatagcctaatgctgaactagtgaactcttaagaaaagcaatgaatttttttcatctctttgtgtccaaagactattaatcatatggctgtcaaatggctggtgctatcttgccaataacatagctaaaacaattggtttgataaacttattttggttataaaattggtcactggttgattaaattaatatataggtagttctaaaactaccgattgatataataagcaccttttcctgtataaaataaaaggcagtgttttcactggaaaatagagtagtataagacatattgccaactttaaggatggaaaatttatttagagagacaagcatatatctttgaaagccaaataatattatattcctgtctataagaaagcagtgcaacacaagctgagatacacataaatgagaatagaaactcctgaaataacaggtcaatcccactcccgtaatttttcctataccccgaggactgcctgaaaatttcactcagaacacataatgcaagataataagaccgacgtaagaataatctaaattcaccacaagttataaacaaaacattactattttattcaaagtaattatgagatattagttctttacaatgttatgagtataatggttaatagagctctatactgcctaataaggtggtcatgaaccacatgtggccactgagctttagaaatttggctactccatgttaagatttataaataagtgtaaaatatgtgtgggttttgaagagaatataaaatgtaaaatattcatatttttgtattgattatgagtttatacaataatttggacatctcagtgaaatcagtaaaattaattttatctgttttttgttttttactatggcaactagaatatttaaaattacatatatggcatgtattatatttctattgagctgcactactataaaagttctacttgaatttagagacaagaacttactgtaaggttataaaattttaagaaaatgtctgtgtgaaaaggattttgttcctaaaatgtgactgaatacatcctcatctagtctctgcttataaacatttagcattacttgaaaatcagtgtttttaaaaaaattgcagtcctcatcagttgttcttatataaacctaaaatttaggctccaaataatttttgcccactgattttagttaatcactttgaaactacacaaaataaaactactcaaattcttaatcttcctaatttttttaaacaaaatgcacggtagtctttcattggaaaatttagaccctacacattgaactaaagaagtctaagtttccattatcttgcctgaataattagcacttcagtttttggtagtctctcccaaagctctttttacatcttcccccttttttgtgtttacctggtggtatcatgttgcttagcatttgggcagcagttaatatacatactcatataatgctaaccagtcaggtcttttgacatttctacatagaaattgtgttatttaaaattccatgtcactaaaaaagctccttgaaatgtctattttggccctcaatttttagtcttttgttcatttattttttcaggaaatatttacttatgaatatttactatgtaccagaaatgactgtaggttgaacatgagaaactcagctccataggatgtctagggaacacaccccactgactgtatctgtggtatgccttttctgtctccaaataattcctgattaaaaaaaaaaaactgcaccctgtaaactaaatgcaaggctgtgatatcactttttatattgccgcagataaattaatctgtagttttgttcttcaggattatgtaactctaccaaactggaatctaaaatcctccatgttcaccattacaatgttatgatttcatcaaatcccttggtaaaataaagactcattatatcaataagcatgtattttatcctttaaaaccatagatttcaaaggaggaagggcttgacctgagccaatggatgattaggattttgagaggatcaaaataagacccaagatttatagagcatgtatttatattggatggacacatagaagtttgagagaaaataatagtcaacatttattaagcttttattatataccagacaccattctaacatatttgatcttagtaatagccctgtgaggtagatattcatcttatctccatgttataaagaaactgaggttcaatgaggataaataacttgtctaagttccctcagctagtaaatggtagagcccagattcaatctatgcattttcatacagaagtttatgttcttcactagaagatgaaaagtattctaaggtcattgaaggaggcataacagaagatcaccaaatggcctgcaaaaaaaggtctatattaggaacacttacataaggctggcaagtctttggggcaagattaggagaagccttgactactgtgctggaggttggactttattctatttatactcaatagatgcaggaggttcttcagcaaataaatagcataatgaaagaaaggtttttgaaacatagtaagctgatcattgggcacaggctggaactggtttgactgaaaggagattttacatcttttcaaagcttattgccttagttttgtgtaaggaccaggaacgatggagtctctgggaatacaaagcaagtggatcatagcaagtcaattgacacttacttgatatttattagacattagagtgagatgttcaaaaatagcatgacttacgttttacgcctgaatgactgagagaaatggtcttccattaagagaactagggaagttagtattgtaagcagtttgcgggaaagataatgtgctccatactaggaatgtgaaacttcaggtgaaaattcagctggctattggagagtctagatgggaattcaaaagtcagataacagcttagggtgaagacttggaaggcataaaaaattgttaaattcgtagaaaattgtatcttaaattaatagaagttaaattcatggagagatgagctagagaagaagcagttggaataaaacaggtaaatctgactgtaaatagacctatgttcttctgacatccaagtacacaataaaagttattttcaacattatcattatgtattcacaaaatcacatagaacatagttgctttcattaaatattagcaaatgtgaacaaccatttaataacataaaatatcaccaaattgataattgtatagttatgattctaagggttgttaatctttttacttttaccgtcatctaaacagtgtatgattttattgtaccgtaattgctaataatacagacattgaaactttaagcatgtttgtaccactaccaatctatactggttcaaataacttatgatatttcaaatggcaaatgatcattaggatttaaaaactggtactgtaataggtcacttaaaattatctcataaatctttcaggggtgtgtagaagtacctagaagatatgtggttattcatgttgcatatgagaatcatgtcatcatgaatagaatttgattattcacttcttcaatagtgacagattattacctttagatatttagtttttcttctacacttatccgtattgttcaccagaagttgccatctaataaaaattcaacctcttcctgggaatgtgactggagaagggtaggtggggaccaaacttgatgaatgtaatcgtcttggcaaaagacacgggggtcattcctgaattggttttacaaaagtaaaatgttttagctctgaaagaaaatcagatttctgtatgtcatctatgggttttcaagagctatcccatataaaatatgttctagtgttttaatggaaagaaatacagcataaagattgagagagtatcaatgtattttattaacagaattttaatctaataactaaaccttgcccacttttttgaatatatatttgattttccatgtcttttcacttatcactccttttcaagggttttgtttagaaagtcaagagattttaaagttttcttagactggtcattatcagttcaaaagtaaagaaactgatgtttacaaggttgaaaagcatagattctttatgtgaaatatattaggttcattcgtttgaatttatttgcatcaccaaccaaactgttcctaaggcaagctaatggcattgtcttagaagagcatgcctgtcaattgtgctgtgctaaaaatgtcatttaaaacatctgagcagattgccatgtagtttttctaaggataagatgacaattctgcatttctacctgaggttactgttacttgataaatgaggcaatttctgatgagacatatttacccaaatgtatttatatcagaatatttaaaataaggtcaaatttgactttagaatattaaaaattagcccattcaaatgtatctgtaaattgactgttgttgatatcaccaaatgatgaattgtactatcttgcatgtatgttcagctctggtgatgtgaaatgtttctccttatttgcatcctcaggtacttttccagttgtatttcaaaacccttcataaaacataatatggaaacataatgcatgtgattagtttagcaacaggaggttgaataaatgtatttcttttggtttatgtttctaataaaaagtaattttgatttaaagtagcactatctttttttttaggcctccattcctttgaaggaattggagcagtttaactcagatatacaaaaattgcttgaaccactggaggctgaaattcagcagggggtgaatctgaaagaggaagacttcaataaagatatggtaaattggttgtgataaaagtgtgaatgaactaggagtggaaataaatatttggaaagaacttagataagtctccaactgaattttcagagcacatattacacattttatgattctaatgaattttataaatgcagaatattcttggccttttattacaaatgctgaattactatggtatggtaatataggagcacttacggtttctaataaatagcccagcaattttcttttgacctgacctacttttgaacttatcaagggcaaaatgtaattggaaaaaagagtcgaatcataaaataaactaaaaatttaataaaatactcaactatcatagatgactgacattttgtatcagcaatgtttttggtagtataacatttatttcaatgaagagagaataatgcataatatgaacattatttattacaatttcccacaaagttgttttaccaaatagttgtttagttagtacattatatgtctaaaatgtgtataaattcatgctgcttatttcatgggagtaaagaaatatgaccatgtgtgctcttcccaacctcagaatattctccttcaatcccaactaatttcaaagtatctactacatttctctctggcttgaatatttgtacatcacatccttattaactgactttttttttctctcttcatcctccttttcacaattttttcccctctttcactgccatcacctctgtggcattcttaacctttacaattaccagtgctagagccttctcagacaatgcttgaaagtgacatcagaagacaatatataaattttaggtaataagtgtgtgaagcaataggagaactattcccaccaatcttagttcccacttcctggagctgcctcaatcaatactccccatgtatggggtttggtggccttgccaactcagcttgtggaaagacggaagaggctttccaagttgctgagttacagcaatctctacttcaggtcaaagaagaaactagagggcaccaagatgaaaaaaagtactgattacctcttgggctgaccccaactctgccctagagccctcaactggtatagggaaagaagtgaagtgggttttttaattttttgttgtttttgtcctcagccctagaaaatgctacagacttttacaacaccttttaaaataagtaaagtcttttacagactataagtatatgatgtgtctatattatgataagtatataatgtgtctatattatgccgtatgtttctttagattattgaccagtctctgacaaaaataatccctttcccccatacaaaatgaatcagtcctcagttgcgtgttgaagtttatgcattatagatttaaatatataacatctaattccttgaattgtaatacacacatacaaatacttgtgacttttgaaatttattatttgttttccttatgtcatcagtgtaccttgagtaccattacaatgtgagactacttgatacaaagttttcacattctgagttgaaagaaagaaaactaaaggtgaaaaatcacatggtcatatatgcgactatattagaccagcatttattcaaaacattttatttctaagtaaagaaaattaagatattgttcttgcagcctaaaggaacaaaatacccattgaaaatgtttaaagccattttccagtccatattttagtattatttgatcgtatttaaattaacatgcatatatgacatattttagaaattatttgatggtaacttagcacatgatttttattaatatcctgatatttctcctattaatattgagcatttaggtttcagaaatgaagcaggagttattagataggaattagtgtacatttaaatcaaaatattttcatgtagttgtgtgttaatattttcagatttgctgttatctcagtcacaaatacacatctgtattcctttatggatcagttaacattataaatgataactttagctcatttctctaatgttttaatttctagaactacactaaaaaagccaaaagaatactttcacagtaattcatgacttgtctgacatgatgaagtaccacactcccccatctttctacaggtgcccctaaaaatgtgttctttacaactagatgggaggaaacttattttgaaacctcaagtaccaaatgtaaaagaaaggctatgagcacagtatcttataatagcattccatgaaagttttaaattggatttttgtgtgtgtttaaataacatgtcttattatctctgttaacaatgtacagctttttaaaaaccaaaatgaagactgtacttgttgtttttgatcagaatgaagacaatgagggtactgtaaaagaattgttgcaaagaggagacaacttacaacaaagaatcacagatgagagaaagcgagaggaaataaagataaaacagcagctgttacagacaaaacataatgctctcaaggtattagagctaaaattataatataccttgcctgtggtttttttttaatatatagggtaaaatataatgtgcattaataaaatctgcttcagacttagtcatcagaaactcactttttctgttcaatgtgtatgctttatttaacatttttgagtggtatttgattttgaacgatgtgttgcttaaaagttatggctttttaaagacatatttttctaagtagtaattgaaagatgggaatgcattcatagtacttatacatttaattttctaatgtgctttatttttatcagctactttatattgaaaaaaacctgcctaactgccagaataaccgatctacatgtatccattattcctgctttctttacttaattgattttgcttgcattaggtccaattttttggtaacctgatacttgtttaataagccctagattcttttatttatttttaaaactttattatgcctttaagaaagtcactctttgcaactatctacaaagtcaaatttcatttatgtaggaatcctaaaaaataatcttagtgcccttgaataagaactgctactttcatattaagcagtgtagtgtatggcttcaagtccccaggtgactcatctggtttgtgcaggaagagcaggataaacttaatttttctataataatatctaggaagttcttgagactagacatgtggaaagttttgtgaaactttttttttgtatatgctttgcaataatcactatttgcatgcatggctgattttctaatacttttaattgctgagcttttccttgtaaatcactcttttgagctatgtagttatgaaggtggatccacctagcaggtagatggagtctgctttctacatgcaaataagagaataaaacctttccccctatagtcaaccaaataaacactgctgagaatgtaattacacaatattgtgcctgcaaggaatccacaaggaaagtctaattggccagcaggtgttctgaaggtaactgctgataaatatagtaaacagaaaaggcctcttcctcgagggagtgcaaaagcacaccataatgtgtctagaaaatcggaacgctatgtaactcacacccttccaactgtgagcaagctttcagaagtatctacactggtcgtatgatggtgtgtgtcctactgaatagcagtgtttaatggtcatctggcattcctctaaagaaatctacatgacatctctaaatattttacatattatacatcactttgtgcttaggaaatgaaagatgtttcagattgatgaccaccaagccctttctcctggcaaagatgtgagttatgtcacaaataaggcatggctcaactctaattcacgtggctgtatcttgctacctttgaaaaaagcagcgttcgatctgactcctcagaaggtttgaaaattcaacataaaacataaagtacagcaaggtttaaattcccaattttaaacaaactagataatgaaatgtagttcattcttgcaaatacaggctataagtgattaatcaaaatcgtcaacactactcgccaaaccaatctataccaacatattcaataactttttaaacctgtcaaatagttccaattctggtccttatgaaatattttagagaaggtcaaaattttccaatggaatgaaatttttagaaattccctgatatttattattttttcgctcgaattaaacctgtgaataaaaccctaattgctactttctgtagaaatgaaagctgcatgcagagcttatgttcccatgaattataaaatggcattttgagtaattctattaatcacagaagatattgagtgtgcttgtaaagagcatgatgactgatttcctcccattgttgatttattaaattagtcttatcacattgatttgaaagcatgcacttgctgttttcttttttcaaatagttaattgttttgcatttagagcatgatttggtatagtaagataaatgtggctatgcaagccttggaaggagaagcatttatctcacataattttttattagttatgttcaccaatatacgaacagtggtgacacttctacacatacagcttggaacagtttataagacaactaaaatggctttatatttctaatcataaaatattaatggcctatgaaactcttatgtaggcatttctaaaaacatgaatgtatattggttgagtacataaagttttgttgatgagccccaaggctaaagatatacattttagaattttacctattttaagtcagatacaaactcactaggtttgtgagtttgtatctagttaagtcaattgtattcgtatattaaactcttgcacataaactacacaacagttagctcattaagagtcaattgaatgtgacaaaatttttaagcaagtttgaacatgctaagagaaaatactttaagtgtgttattcaggtttcttagcttcctatacatgggtcccgcctcatgcataggcaatttaattatgtctttgtatattttgcatttaaatatgattttaacctaagttgtacaaaaagatgagggacgcaaattattttgataaataactgcagccagaagtgcactatacatatatattgatattttaataatgtctgcaccatgaacaggatttgaggtctcaaagaagaaaaaaggctctagaaatttctcatcagtggtatcagtacaagaggcaggctgatgatctcctgaaatgcttggatgacattgaaaaaaaattagccagcctacctgagcccagagatgaaaggaaaataaaggtaatgttgttttagaatgtcaataccagattttattatacagtttaattaacctgtgaagatcatatttaaaatgttgatgttcttgtttctattaacgttctctttgatttgatgcatttccttgtattgtgtgttgttttcagtaaatgtattgtattaagtgttattcaattgacgtaatgttgaatgaataaaatgttttagactatgtaaagtgatttaagaaatgtgatgtgttttctggtaaaattgtaattgactttgtgtatctttgttccagatgaactaatgacttatcggtatatggacgacttcttactcatgttagcccattcatttcatcagagcatcttcacacatcagtgttcactctctatagatttatttgcatattgtctaaatatgtttttttctgttattattttacactttttattttgcttcattctctgttgagttcctcaaacctttaaaaaggaaataaataacttattcacttaccctctaaattatattctatgtggacggtccctaataaataatgagttatcactccaaattgtttcaaatcccaagacaccagaggaatttagaagaaagaaaatgttagaccaatttcaatatttacttaattagaatatctaaaaccaagcattcaaaggataactgaaataatatttgggttattgagcgaggatgacagtcatgcctttcatatttgtaaacttcaaaggatgacaataaagggacaacagcctttgaaattttgagagaagtatttgctgcttgcaagtcggttgatgtggttagctaactgccctgggccctgtattggttttgctcaataggaaattgatcgggaattgcagaagaagaaagaggagctgaatgcagtgcgtaggcaagctgagggcttgtctgaggatggggccgcaatggcagtggagccaactcagatccagctcagcaagcgctggcgggaaattgagagcaaatttgctcagtttcgaagactcaactttgcacaaattgtgagttgttactggcaaacccacgtatgtgtttgcaactactactctattaacagaggcctactaataaaaaaaaaagagacaaaaaatctgggtacagttttaaacttctaatgtacattctgaaagtgagtggtttccctcactttgggcttctgtaacactagtgcttaattttgccaattaaagacacaagaaattaacagataacagggaaaaccccttatcaaaaatgaaaatacatcttaattttttttgctacatcatttttcataacattggcaatgttaatttgtcaatttatcatacattcactttacttcaatgtctaatccaaaaaatatgtattgctttcctgagatcatcccatgctgattttactttcttaatgtatacatgataaataataaatatttcatggtacatcttatgtcaacctgcataagccattatctcattgacttgaagaataatagcttaatcctcacacctggtttaactacttaatgggttacagtgcccataaaagaactggatgcctagtaagatggttgctaattgattgcagattgaacaatatcagataatgttattactgaaatgttaccagccaaaacaaaaaggagtgactgctcttctttcaaacaactgaatggaaagtgtatggttctctctttaaaaaggcgattcagaattgttagcttggtctcacttctttatttgtagtaggtataaaccatagaggttttctgacaggtacatttttgttcctattattaacacttgtaagatgaagaggaatgatcatcatctgtaattatagaagaaagtactcctcacaaaaccaggatgtcaaaatctggaaactaagtctttatagttaagttaggttgaattatatgaatcaaacagatactcaaccattttgccctatgtaaataataactgcatagggttcagcccatgtatgagacttcttgggaacttcttctgtgatagtgtcagttccatttaatttggtgtatatttttaaaatgtcaaaagcagttaccataacttaattttataagcatataagggaagtatgttgcatattattgtgacttcttttaatacttcaagaaaattaataaatacactgttttctgttaaatctaataccctaaagtttaatagcaggtgaattattctgagcaattggaagaatacgagaaatagcgaaactgtattgcatgtgaagtctaattccacctggctgaatgtttcagcctattatccttcatattagatgttatgaatgtaatgtgtcataaataaccttacactaaccagcaagcctgtgtctgcagatgcaaaatgaagcgaaagattaaggcaatcaaaaagaaaattctaataaaatagtttcacctcaatttaatagatcattcaagggggagtcctttgctttgaattatctgactactaactcatttctccattccaattttccccaggtcttgacacacccaatatgcaggtttaaaattcgttacaaactaatcaagttgctaatgctttatggctaaataggcacaggatcaaaaatctccataaaccacttacttaaaatgccattatgtccctattcatagtaggctctcaacaaatatttgtacaacgtaataatgactggtgaaataaaggaagcatgtgtgaaccagtatatatttttaaaaaattgtagtaaaattctgggatatattttcctcataaacgatttattcttaagttttatatattaaagatccaaaattcagaatgtgaagggggctatttttgtgttaactcttaattatccatgataataaagtaatcacaatctgtatgaagaataatcaatttaatattgcagttatatttggcatcgtattttaattagaactgagggataattgatagatgataagtaggtatataggttggtaggtagatagatagacaggtgggtgtagaaatattcaagatacatctttatacttgaccaattgtcaatgcattttaaaactaatttcactgtggccactgattagagttatctttcccaattcttacgccctagagtcatttgtgatagtcacagtaacagcttaatgaaaagtagtatttgatataaccttacaatggctctgatgcagcatatgccatagcttcagaatttcttacctccccctatattctccttctctaattgtttgatttttacttttcctaactgtccctttttgtttttctagatataaactgtaggcttaaagttcatctttcatgtctttacagcaacatgttgaaatagtaagcggtactcttaaaatgcttagtatgtgagagctgagtgagtttaaaatgaaaaattaattttccttatctcacagataaagactcagagaagtgctaaccactgtaaaattaaggcatttaggggactctgtccatgtcagagctatatatggtagtaataaagctcagaaaaggactgagactttgagggaacaatcatgaggcagcgcccagccacacaggaatgcagaccaaagcatagtagagggtatctgcaaattgtggtcctcagggcaaacctggagatgataaagaaagaggcatgagactgggaggacgcaggtaaaaattttaccagatattcaaaatgagagaactcctgccttaattaggaattccaatcatttctaatatatttcctgttggtttagaaactaggttcctcagttaagaccaagcacggactgtaaactgaggaaaagggatagttctataggatgtactatcacagcagtgtggtctagtaaaattaactcttggataaacagccttgaatatgaatcccagtgactttgagtgctgtatgatcagggataaactgagtctcatttacttcatctgtacaatagagataaggatgtttctgaggattaaataaggtaatatttgtcaaacacctgctgcgttatgcaggctcaatgcatgaaagttttcttcgtctcctttctgtatatatattaacattggaaaatagacataatctttaatttttaaaatattttcataagtcattaagagaattaagtacgcagcatttgtttaaaatgttaacaacagatatctcgttcagtgaaaatttcaaatttaattctataatatataagcagatacttttctctagattcacagaataaacacaggaaatatcacacaaatctgatgactgccaagaaagggcatgattttccctaaactgcccctcacatcattgtagcatttggaaaataacctcagagagcccaggcatttgcaaacacaaaattatacaatgaagataccactacaacccccaagggtcatgtgaaactgctaaggaacataagcttacaaactaaaattatgattattgtggaaaaaaattataagcaatgttatcagatgccaaacgttaaaaggagaatgtatacctgaagaaaatagagataagaggataatcaccaaaggatattaagtaatttttaatgttcaaaaataaaaattaaatggatttttttccagtaagaataggccattatataaagtgaaaacgaagatttgaaaaaacaaagtctggaaatgaaaatataattaatccctcaaacatctgcgtgaaataagtttcaagttgaaaaaaatagggattatggggaagagacaatatttcatattaatgaaatttaataaaatggaataaatgtaaattttaatgaatcctcaaattcaataaaggtcaaccaacgtggaaaaaataaaaacaagtctaccagctagctctgaatgaaactcagagcatcagtaatcaaaaaggtatcattaagggttacttaagacaaaagaacatttacaggatgacaatattgactgaagacttttcatcaacaatagatattagaagacagttgaataatatcttcaaaatgctaggcacattttcaaataccaggtaaaacatgattcaagaattaaggcaaaatattctcagacatacagctagtttcacctgaacaaaaactaagaatttcttgtctatagatttttgctaaaataattactaagcaatatatttgtgtaaaataaaatgaaactagaaggaaggagacagcgatgtaaagctgtataaaattgttttctctgtaaataagaacatttattaaaaaagcttataatcctaaaatttggtcagtgccaccaaggaaaacacagaatactaggagaatgcagtgtttgactgatcctgtgtaaagagagagaaatcaaatagaagacttattgcatatcctatgaattacatatccttaattcatatcctgcatattacatatgctatgtaaagggagataaaaacaagacttattcgagataatggcaacaaatataaggcttgtgcataatgtgttctatgtaaattattaccaattataatgtttctagatagcaaaaaagtgctaaacctctgaaatatgtatacatacatgacctttccaagaacagcagcaaaaaaatacaaaaaaaagcccacttcagtgaagaaaaagaaatgtccattttctaaatacatttccacttgagctgagcatgttatgacatcaaataccaagtatatgatcttgatgtttaacattttatatccaacagtctcttatcttggatgcctaatgagcatctcaaacatacaatagccaagtgaaaaataaatgatccaccccccatctacgttaattggcatctaccaacatctccagatgttattaaattgcactattatttacttaagtcagaaacctagacatccttcatgattcttttctcttacattaccatgtaaattatttccactcttgttggatatacctgcaaaatgcatcaaatcactcctccgtatctgttatggaagtgctaatctacaagattattatctctcatctggattacttcaacaacctctaacctcttcttccagtctttccccacttacaccatatttctcctggtgaaggcagagagctccttctaaggagttaatgagatcatatcaggcccctcctgcccattactctttaaatgaaatcctgtgatccgctatatgatgtagccccttcctatcacttctgttactcacactttgtctccctttttgctcttctgctaacatagaggcctaaaggtttcttttctatacttaaacacaaccaatttcatttccatatcagtatctttgaacatatttttctaatggaatatttttcacctagaattttgcataggtgctataacttatttagatatcctttcatttaggaacaatgaatatttagtagaactttgatgtataatctggttatgtaatgtagtagtttctgttataaatgttttatattccctatacttatgtatgcaaattcggagtttaagactgctcgttcagaacatcagtttctcttacggttacttctagaagtaggcatactaaggaaagacacagcttctggaacataaaagtgaggtggtaaaagatgaatatgaagagggttacaatattgtattgcaatggatagcttgtcctacagcagagtaattgtaatgggatattttgacaaaattaaagtacacatttccaaaatatacatgctcttggaaggctgatagaaaattaaccttgtttgtagattaaatgctgcaataaatgtgttatttaaaatagtccttggctgggcgtggtggctcacaactgtaatcccagctctttgtgaggccgaggtgggcggatcacttgaggaggagttccagatcagcctggctaacatatataacatgtcatgtatatatatgacatgctatacatatatacacatgttatacacacacagataacatgttatacacgtatgcacatgttacatataacatatataacatgtacgtatacacacgttatatataacatgttatacacacgttatatataacgttatatatacacgttatatataacgttatatatacacgttatatataacgttatatatacacgttatatataacatgttatacacatatacacgttatatataacatacacgtatacacgttatatataacatacatatatacacgttatatgtataacatgttatatataacatgttatacacatataacgttgaatataacatgttatatatgcacgttatatataacatgttatacatatatacacgtgttatatataacatgttatacatatataacgttttatatatacatgttatgcctatatacacatgttctacgtatatacatgttatatatacatgttatgtatataacatgttatatgttatatatacatattatgtatatgttatgtatataacatgttatgtatatgttatgtatataacatgtttgttttataatgttttatatataacatacacatgttatgtatataacatgttatataacatatacacgttatatataacatgttttatatataacatacacatgttatatatataacatgtatatataaatgttataaatacatgttatatatacatgtatatacatatatacatccatatataacatatatatacaagttatatatatatgttatatatatgtattatatatgttttatatataaaattagccaggcttgctggcagttgcttgtaatccaagcttctcagaggctgaggcatgagaattgcttgaaactgggagacagaggttacagtcagcagggatcacaccactgcactacagcctgggcaacagattgagaccccgcctcaagaaaaaaaagtagtccttaattgaataaatttgtaaaataaacacctatatattgtgaatatttttccactaacttttttaagttgtttgaatctgaatagtattatacattcacaaagagttttcacatgcatctagtttgatcacagtaatgaccctctcaagtatcattttctttgtcattttactgtaagaaaaattagcataaatgaggttaagagatttgtccaaggatacatctgagaaatggaagacgccaaacttgaactcactgctttccaaaacatggtgggagttattaataaaaaaggaaaaaagtttcagtgtttaaacaattttggtaaacagtagattaagcaaactttccttactctataactttctagtgcgtttgatatgctaatgggattatgactttctatgaaggggttagattctatagactttcacatctagacagttgcagtagaaaagggaaatttgatttcagattgatgaaaggtttcttatttgagtgatggtgaaataagaatattctttagaaaaaaatgggaagaacatcaccgtatcattattcttctgttgtttgggatttccttaaatttaagcagagatgtacaagaaaagtaataacagaactgtttgccaccaccttatgtaaaataatgtctgagcctagatttaatggtctgctacacattttttatattgtctcctatcttgtaataaaagcaactcattttgagaataaaattaggggaaatatattgtctttgcataattgccacatagattttcttctttgccttgaaataacaacaaagattgtcagctgccagtgcaacatccttggagaatttgggaagataaatgattttcttatttagagacagaatgttctttagcaaatggaattgtaaatacaaaagactaataatggttgttaagggaaatgttgcaccaggatgtagctgtttgtagaatttttctcctctcagctcaattttgtaattaacatattacaaggattaaaaaagaaattagctaacattttatgtttttctagattgttgatgatcatagtggttataaatatttgtacggagtttttttgttctagtgtctagttgtgtagcataatcagtttaatggttaagtagaggcatgttcagcgagtatcagcttccagaaagatgacagactgacttaattcctcaccccctcacttcaaatgcgtggaaattctgaataaaatataatttttaaaagttttaaatacacagctgggctatggtggaacctctcttccctctgtgtgccatgaatgatcaaatcatcttacgtgaaactgaacctggattgagagcctaatggctaggaagaagttttcaagaccttttaggacaaaatatgtgaccttcaacaacacataatatagaggtgaaaataaaacccctccttaaagtctgaattttcaagggcttccctcagctgtaaaggggaataaataaatcctacccacaatggagaagaggcattatctgtagtgataatagcttaggattttcaaaacttaatagaaattccaatactccgattgggaaactgagcaaatctgaagcagaaaagattattaaaaaaaagaaatataagtatagatcatcactatgagacgatgaatctgatgaatccaaaaaaagcaaagaaataattttaaatactgctgtatttccttagaaagtagtgacacttaaaatggtacctggttttagagcaatgatagaagccagaagacggtagaataatattttcaaaaacaatgaaagaacatccacgtaggaacctagaattgtgtactgatagaaactctctttcaggaataacattgaaataaagatcttttcagacacacagaaaccgtttactagcataaaattccctttagaggacgtcaagattggtctttaagcaggagaaagatacaagatggaagatttaagctgcaaaagaaaatgatgtgcaaagaaaatggtaaaaaaatggaaaagtcttaaataaacatttaccgtgtatgaaagtgtctattaaaaaacagaaaaatgctggacatcaatgaaacatgagaaggtggttaagtttttcatccagtttacctgctacctttctatgtattgtttctcagtttccataggtagtacctacttctctaatgctgaaatgcctcagtgctcagtccttgggcacttgccatttttatttattctatatatgtcttgctgttttcatccagcctcgtgacttgattaaaacaaaattattcttttcccctcaaatgcagtggaagcaccgttctttcaaattttcagagaaaaaaaaaaatctacgcatgctttctttagcctatctctacacaatacacagggacaacatttgaaaaatataaaccatatttaaatctgatcataatccttcaatgaattcccatctatttttaagtgaaatccaaaactcttcatgaatttcaagggatatctgacctggctggcccacttcttaactcaggccttatctcttaatactttcctctgctccacctatgttgacccctttgctgctgctttcacagatctgacatgcacccattgcattgtgtgctacctctgcctaaaataatcctcccccgtttctccatgtggctcttttcgtttctgccttaacttctttactcaaaagtgtttttttcaatgaatctttctcatgtgtgcacatacaccacacacacacacacacacacacacacacactttttatccatgctttcctcatttatttttctcaataaagtgcatgaccaggaaagttctcaatattttccttctttatcttcttgagtatttatttccctacctagaagtagagctccaacccaacaatgcaaaaaaaaattgtctttttttcccactgctgtgtcctcaacacccaaaacagtgactaggtacacagtatatatttgtttaattcataaaataagtaattaatcaataatgaataaagcaattttaagattctcttagtgcttagaatgaaaacttgcaaaatttcttgtgcgtgttaagaattttatactaatcattaaatcgatagaagtatacaatttttgaatagtagagggaaaaataaagacaagctattaagttaaagcaaataatccaaatagaaaactgaggtttaagaacattaattgaattcatcaagggtagtaagaaactatatgaacataggattttgtgttttccgaatatctctagtccaaagccatcactatgtataaaataagatgttaattacagtttaatattcttgtaagtttaagcaaatttaccatttatacgtgatttatacaacatattacctcttgaatattgtctcaaatgactggcttcaagtagcacgttaaataaaaatagtagaataaatgtgtcaagctacacttactattcacaattattttatagttagattatggctctgttagatatacaattttatatttgcttatcttctgaattaatgttacagtaatagactacagtcatcatgcaatgtgttgtcaaatatattaataaacataagaaaaaacatagtaatatactgtgtcaaatttttctatcaagtggaaatttagcacattcttcaggaaatattgactgcaaaatctatgattaatatatttttcagaaatattggatataaatacaaaatgaagtgatgaattattgatatgtgcagttttactatcatataatgttactgataaaattaaaaaaatataactcatttttagcatcagatgaggaaacttggttcactaaagttagtattatctttatttgaatgctacaaccttgaaaaattattacatttgatagaactatttgggaacagtttgttacttctcattgtgactatggacattaatgggatgcccatattccttccattcccttttcttagcatagtggaaatgattacagatatcagttatgtttcttgactgatgttacagtcattccgcattatgaagtatgcaagactaaatttttacaaagggtatctcttatccttatgatagcctaaaaaggtgaaaatttgtcaagcaggtttcctaagatcctataaaattaggggacagggttccagcatcaagatgtagttttacttattgaattaacacagagttttgttgatgattttctttgatgatgggggtagtgatcgtggtattgttttattacattggtttcttcctttttttgttcatttttaatgggaacctcccaataatggtgaggatgcagttaaatggtaactccatacacttagtgtgagtctagaaataaattcaagttttattttgaatacactgaattggtatttctttcattgaataaacatttatctagtgcctcctaagtgccagacaacacaaaacgtaaaataccattggcaaatccatagcaatcatacaaaagacgtgatatttgataaatataactcatacaatgaagaaaaaaaagaacaagaatttatacacagcaatttgacctccgtttgcaacacaacaatataaagtgtaattttctccaatctaaatttgctttgaaaatatggaacaccagctggaagggagctcagatggcttctgcagtggggttggaaatatccttctgagcatgtccagaacaactggttaaaaataattaaatcacttgcaccatctgtgaatcattctgattcttcaatgattacttaagactctcattgtatggaacatattctgagaacagatgaataaaatctattcaagtgtatattgttttccactttgattttcacaaaataaaaggattataatattttcaagttggtaagttatctgataattctcctgccctcctttatgatccagttgcttttgaaataattaaggtttgtttaaaatttagttttatgaataatacaaattcacatagccttgatgttataacataattttgcttaaaaacattctatcatttttaccctttatttaatcttttgagtatagtttagcacccatttagtaacagccaagagaactaaatggaagtccgaattgattgcattctcaaatttagcaccatatgctataatcatgagcagtttttaaaattcctaaatagctattttaacgcatgtaaaacagaggaaagctatatttagtggtgactaatccatggatgaaagatgcatggattaaatataatccaagtgcccatatctgtacaaacttaagatgttcagataatttggaggcattgttaactgtttttctggatatcagtgcatgggcacttctcgccagaataaattaactggggaaagttccagaaggtccataattttccataataattagtgctttcttagttaatagactatctgggtgatgaaaaataaatgaattacctaacaaatacagttatctataacatataactccatctgtgacccgtataaagctcaaaatgtgttaactggttagtatctagacaatcataaacacacatgaaacatgaataatatcggtcactatattttcatttcttgcttcgtagatacactcgagtatttcatatgtggaaaattaagagatctagtcctcttcatatattggcctccctaatgggaaagggtctctttaatctgctacaaagccctcctcttctttaaacttgccaagatgtcttctacctcaggtcattgcaattatgtttcctttgacttgggcctctatttctggatatttccttgctggtctcccgtcacattgcaggatgcagagtgaacattatctccacaggtggcctgccttcgacaacctattttatgtcgttcgccacatccattctatccttaccatcatgctctagaacatcagctagacgtttcccttctaatatttactgcaatctgcaaatgttacctttgcatgtttacttgtttataatttgtctgctatcattagaatgtaggcttgatgaagtcaggagcctattctatcttgttagtcactgtttccccaagacatagagtctatcacagagcaggtatttaatgaaagtatgtggaatgaatgattgaatgaatgaatgtataacatcttcctgtggaaatccctgcagtttcagagttggttgttctgtatttttatgtcagtggtatcctaatgccagtctgccatggtccagaagttttcaatggtccataaggaaaagaaaaaaaagagcaattttttatttagcttttcataaagcaaagttttttaatgcaagaattgtcctttctttcaaaattatgggtttcaacagttttggaggtattaaaatggcctttctttttctttcttctcattttgttacaatgtcctttactagaaaaagtaaagggcagaacttttgtgatgttccctaatagttttttttttttgtaatgttgttattgacctatgaaatacaatgtccgtaaaccaccaacttagataaatttatttacatgaaggaataccattcctgctaagtttctatattggttgcttgaagtttcagaatgaggaagagaaagcatgaaaaccatcacctcctatatgtatggcctgttcggcaagcagtactggccccataacagttatccactggaataacattcttgaatttattttgtcacatgtgaggagcaaaaacaagacaaaatacacaaaaaagagtagaattagggtatcacgacatttgtctaacattgttcaacgttaacacttacaaataataaaggtaccaaaatggtattttcttgtgtataaatattttcatcctctggatttgaatctgtttttgtttgttttggtgatataaagaactcataatagtatcatttcctgatgatatttggaatccaaaaattaattcaaaacagaagtattacattttctgtccttttcataattgtaaacaatgcatcaagatcaaaaacttaacaaaatgcgttaatgttattatgcatgcttttttcacattctttatttcccagtgatcataatgactaataattaacataattatttgtgattgacaaaagactctaacgttcatcattttagttaattattatttaagaaataattggtctggatataatataagccaattaaatttgtattctgaaaagttttgagaagtgaaaaaaaatttattttttatttggtaaaatactttatttctgttgtagctgcttttacaaggagattgtggggaggaacagtcatatccaagttctcagttaattaccttttcaaaatatatgatctaaaatggagtgaaaattgattgtgtcaatatgagtttttagagttaaaacttgtaaattttctggacagaatagaacaattttatattggaatccttgccataggataatacaatgactattatttcctggaacattgacagagaacaagctattttaggagaaactatctggattgtaaagtagagcacattaagcctaaggtgtcattaaattcacaaaacttttaaaaaagaattgagcgtaatctttggtaagagaaaaatggttttcttcagtgactattaccatattttgcaaagttataacctggcaaaatatattattttgggaaaataatattaaatataaccatttctatacacacagtggcactttatttattcagaggtcagatggatatcattttaatttacctgcaacacagccaagagtcaggaatggagtagaacaaaaggcctctcgattcccaaaattgattttttaaggttcatgaaatccaaagcttacttatatttcattatgaaatgaatttccaaatccttttttggagattttttaaaaattttgctttgattaaagaggtaattctaataaacttaattatctctttttttttttgtgcccctagtagctttgaagtcaaaatgggacagaaggaataaatgactgaaacaggagataatagctgcagcctcgagtaaggtgaaaaagaacctatatatatggactcatagtttggggaaataatttagcacagggcaacacagatgagagagggagggatggaggaagggagacagagagagagaacagataattagtgtttatttcattttatacttatggataatttaattatttcaatagtttattcatatagttaggtaaatactttttttttttttttgagacagattctcaccctgtcacccaggctggagtgcagtggcatgatctcggctcactgcaccctctgtctcccaggttcaagtgattctcctgcctcaacctccagagttgctgggattacaggcaaccgccatcacgcctggctaatttttttatttttttagtacagacagggtttcaccatgttgtccaggcttgtcttgaactcctgacctcaaatgatctgcctgcctcggcctcccaaagtgctgggattactggtgtgagccatggcgcccagcccaaggatctttaatatcttacctatgtgcaaaagtgtttaatacataatgccatatggcatattagcttcctaaatcacataccactgccaccagctaacttatatctctatatttacatctgaggctgcataggcacacataaatgtattcatatatgttacacatatgcttatttatgtagctatgctatatgttatttgctatttacatctattaagttacttagcaaaatatgtcctttggctttgaaaaaaatgcctgctgaactcatcaagattatgatttttgtaggttattctccatcttttagtcgagttcctaaagttgtgtttttttaactgcctgctttttattgcaggtatatgaaattgttgtgcatatttcaaagaagaatagaatgcagggtaactctcaaacttgttatttggaattaggtcagataattttgtaaatactgttatcagtatatcacaatgtcattagtgtcccttcaagttaagggcatggaaataaagatggtctaatgtgccaggccaaagaggaaaacttttcagcttagcaaagtgacttcaaatacatggggagaattgaagcagtcatttcaaatgcaaacaaaaagttgtatttttatggattacaatatccttagctaaatgtttactttggcttgggtatttttctcattagtgatacttatttaattagttgcttataaattgaacctgggaagtgtagtttgcagtgagccgagatcaagccactgcactccagcctgggcaacagagcgagactccgtctcaaaaaaaaaaaaaaaaaaaattgagtacttaagatcaattaaaatatatcgagtattggatgctgtcacataagagtgctattagccattggctgttaaatttcctcatctccaggaatctcaggcacctaaaaataattctctttacttcatgggcaacagcagccactagtctttgccacgactcttctgtcaattgggtatgcagtgaggggcaccaatatggttttaggtgatgatgtgaaattgtttcaaaatgctttcattctcccttctgaattttgtcttagtctatgcttccataatattgggagccaattagtagtacatgccttcctgcagcttgaatagaagtgaagtctattatgaacaataaagtcaattagagggggccatgcctactgataaatatgttatgtaaagactcaatttaccttgaaatctgtatctatttgcatctactctttagtgctagttcagagctctgtgcgattattttaaatgtattgcagtattactttaatcaattaatacaaaggtagattaaggaaactttactactcttcatttcttcattctgctgattcctccctcactgaagcaaaaaaaaagtctacaatttagtctttaaaaagtctatagtttagtcttagatatctctttgtactatattccatatactgttcattcttaccaatgaatagtatatatagatatattttacttttttaaaaaatactgctttattctgtgtattattttaaatataacagtcaattagaaacatgttcccaggtaatgtatatagatcttatacattctttgtgaaagtcttagatgatgaatcaaaatgtattctattattcttctacatttctggattattatattttgattagaaaaggtggcctatcaaatctttctttttgatgcttttaaaagtttcctctctatgtaatttttgatgtcccaagtaaataggagaatatgctttttccagtgtgcacaaaatacggattaaatttagcttgtcggttttaaaccacctctattcttgttttttatttgtattttttgtctattttaatctaacaaattacagaagagttgtatgtaaggtaccaactacagctatgattttatcatgttctccttttatttctagtaatttttaccttatgtagaatgcacccaattgtttggggcatagcaattaatgactactgtgctttgggaagaagtgtgatttttgtcattacaatggttctctgagacccatttagtgcttttcggtcttgaactatacttcatttgatgctattattttgactttcactttttaaaaaatggttttctaaatcaccattaacgcagcattgtgaccttgtatttttatgtttcttgtgactttcactttttaaaaaatggttttctaaatcaccattaacgcagcattgtgaccttgtatttttatgtttcttgtaaacagcctatagatggagtgtgcattttaaactagataattttgtctttttaacttatgcaaatatttttacatctttatagggtacatgtaatattttgctacatgcatagaatgtataatgattaagtcaggatagttagggtatccatcatctcaagtatttatcatttatatgtgttggaaatagttcaactcctctcttctaggtattttgagagatacaatatattgttgattatagtcaccctactcttctttcaaacattagcacttactctttctatgcaactgtatgtccgtacccagtaaccaatctctcttcacccattccgcccacctacactcttcccagcctctggtatctataaaaaaaaatcacatattcttaccaatacgtgcttgatcttatgaagatataaaaatgatagatagttcatctttagatgagacattttaaccaacttcatttttacaataactcttataactgtgtctgttttaattccttgtcatattgatggtcattattttatcattttatttactcttatcccttgtctataattttataattcatcatcttcttcactgcactctactgcatctcttcccgcacttataggttatttataagttatactttgtactatcattttactagtgctgtttcccattttaaacaacaattttatgcctatatttctgtagtgttgcgccaaaattaaataagaacaatgccctcatcaccaagatgatttacttagtcaactcctcattattttcaatcaaaggcaaaatcctttaaaaagaaataatttataattttatttcctggctactattgttttcacttgtagtatcacatactagttcaagatgtcatgttattacttaaattacactatcacttcataaaatttgaccacaaacgacacaaggtgtatttcctgtcactgtttttttgtaccgtttatttctcattgttttgaaatctttattacacagtcatccttcagtgtctgtggggcactggtttcagcattttgatatcaaaattcaagaatactcaaattatttatataaaatggcatagtgtttgcatgtaactatggacaccctcctgaacacttcatatcatctctagattatttatagtacccaatacaatgtaaatgctatgtaaatagttgttatgcagtattgtttagggaataatggcaataaaaatgtctgtacatgttcagtgcagacacagccatccatgtatttttgcaaatgtgttcgatcgatgactggttaaatccacaaatgtggaacccatggatacagagggccaactgtacttcagttttaatttggttggaacacatgagaaatgtcctcgtaaaaacataaaggatgtaaactttgtaaaccttgcattttcgaaatgatctttgctttgcagtcatcatgatggatttattggatagtaacattctttaatatctctcctctttttttagtagtctctgtaggttatgaacaattgtcttccagtttccattgttttcttgtttcaactatcttcaagctactattgtttccagtgtaaagtctgattctagtccaagtatcatttatttgtatttaaccttttttctttctctcaaactctaaagttgctgtctgtcccatctattgaagtacagaaatttcattaagatataattttaaatgtttctaaatgtgtccctgtttattattttattttattttattttgtttttatttttgagacagggtcttgctattgcccaagctggagtgccgcgatgcaatcatagctcactgcagccaccaactcctaggctcaggagatcctattgcctcagcctctttagtggctgggactacaggccatcagtaccatgactggctaatttttaaaacatttgtttgtagagatgatgtgtcattatgttgcccaggctggtcttgaactcctggaatcaagtaatcttctcacctcagcctcctaaagtgctgggatttcagttgtgacccaccacttatttaattcttttttgcacttgggtaacgttttaaataaccaattaatattaataacttctttagctctggaaaattttctattatgattgttttaattattacaaatcttccatctcttcttttttctcattctggtacttatcattgcttaataggtatcttagatctgttctctaagtctcttattttttcactattaatgtcagtttatttctatttgtctttaaattgtgatatacttcttctggttgactgtaaagaacccatattttatttttagccatgatcattctcttttctaagttgtctattgttatttaaaaactaggtaacaggctttctgtgctctaatgttaaccttttaatgtttctaattttatttttattaaatgtaccttccgtatcttctagtatactacttgtatggactctcagctttgtctttctctccagccccttgtgtcttctgaaaaagcctttgctttattttctctcatgcctaagtcaaagaatgtaaaatgtcttggcgcaaatgcagttaaggttttgatattttgatgcatagtgattgattgagaagcaacatggatactggaagttttgttgttgttgttgttgttttgatctgatgaataattatttaacaagctgaaacctattcacaaaatttacatatgggaaaacatctctgatctcatggacaaggggtggaagtaaggctgtcctcaaccatgtagtacagccactctccagtaatgcctgcatgaaacaaactagcaggtactgacccccttcttaagtcaaacagatctccttaaatcaatggtctccaacagatcattccacatatatacttgaaaaccatcagatccatcatttctgtctcagatcgtgccaagatacacataactttgaaatatcaccagttcatcatcattctctcttcacctgcaatttttttttccataatttgaggtcctgatacatatattcttctaaattgtagcagttagttgtgattatcttgacgttgcatggactcagttcaaagtgaaacagaaaacatatctacgatgtgatttacccattctcaacatttctattttgtgtgtctgtatttgcacagacacgtacatacatacatgtgcatatatataattaataagctttgaccatataaataatgcaaattatgtataattcacaataataggtttttaaattaattatcttcagagttgagtgagattacttacagatttaggctgtgtctacctgaaaacaaaatacagtgtattagcaattcagtaaaatcaattggatatagaataataacaaattagttgagttttcaccttgtgacattttagtttggatttagtagcctgtctaaattacctttgtgaaaaaactaggctacaagtattttctgatagatataataccagcattagaattattcatataatcttagttttcacattatttaaaatagaacacattgttatattttaataagcaatttgaaaaagaaacaaatctttctttcttgtatgattgccattataaaagaatattaattgagtgctcattaggtaactttaaccacattaagtactagacagccctttggacagagactgagtagaataaaaaacgattacagaacatactttggtattaaccttttctataaataaaatgtattgtcattctctagattagcactgtcctatagaactttctgagatgatggcaatgttctatatctacactgtccaataaagtagctattgaggctactgagaacttaaaacatggctagtaaaaacagatgtactaagtttttaattgtatttgcttttaaataatttagatttacatttctttcgtcaagtgtagctaatgactaccatacgggatagtgtaattatatgcatctttactatcactcgcatttctaatgaagagaatacttccttgaaaaacataattatgacacatgcatatttagacatagatactgagttgccgcattaatctagagatagtgtccacattttctgaggggtgtgacaaatgtaatatagaaataaaagtgtgagtttattctgaaaaatctactcaagttgacagatccacaaggcaacagaagttaaaagcgatataggagggtgaaatataactgcagtatttaaggtctttccatacttattttttcttgtgttacttttattttcacactgaattaagtataagtatgtgtgtgaggtggagggagggttcgatttgcttgtcaacatacaaaaagattgctatagcaagtattcccaagctgaaattttggaatagcttaaaataaaaaatatatactagatatgtaaacgaaaacttttatgagaagagtttgggaagagttatcaaaggttaaaatgattttttgaatacaagtcttctcatacccttcaatttgctaatagacattatgatacccatgaagaagctaaaatcagtatatcttaatatcgtctatatgtcattacctcaaataattgcttatgtttgtattcaagtataatgagtcagattagtaactaaaagacaatttaaggacctaagcacgcatgtacaatagcatgtagctaatgtgctatgaattgaagaaatgcgacatagtgaaatcagatataccttttaaatctatgacaataaagattgcattataaaatgaagaaaatattcctgtttgaattctgaatattcctaaatataaattataaatgtaaatcccagcaattgtaaccacatatctatcttataattatcctgttaagttgatacttgttttttcattaatttatccaacaaatatttttgataacatactgtatgctaggtactaggcatgagtctttgctgcatttattttttgctgccttataagttggctagggtgtataaccttatctattaatttataggttattttttggagatggttttacaaagcaggccatgattgttggtgcttatatattgctgcttatgtgttgatacttatcttggtggcaaccaaagcccttttctttctcttctctcacaggccatacttagtgactaaaattttatcaagttactaatttatgttaattctttgaaaatctgtataaaaatgcaaatgttgtcctttgaaacgaaagactttaaaccactataagccattaacacattttccagattcagtttatcagcttaatttgatagtaattgagcttggccctgaggaattaggtaaatttcatggtgtagaaagtcagaatccacatgaggcaggtcaatgagcaggtctgtccagaccttttacataggacactatttatacctggccttctagaagcagggtgtatttaaagactggcaaatccagcatcatctgcatatctttttcgctgacagcctgccctgctttaaaaattaattctaactttagaaaataaataatatgggcataaaggatgattttctttcatattttaccttgactattttgtgtatgttagtgagttttattctttttaaacaaagggggtaaattgttcattgattctgaataattattctgagatggacaggccctttttttggttacatagcttcacataagcaattttttagatgatgcaataggaagggggaaatcacataagagcaaacactctctcattgctattttttctatgcacggtcataaccaatatgcttagactcattagattgattattcaacatctttctacccagtgacttgactaaaacagacaaaacgaagtactgtcagaatgctgttattgtcatgccattatatgtatccaaaacagtgacaacgcagattaaaaccatacccgtctcacctgcatcatgttgttttgtttttatgctttattgtttggggttttttaatcaccctggaccaatacaatatttttgcctaatttgtttgtgatttgcatttttatgcttacaatgcctattataattgtccaggagaaataaataaaaaatctctcaactttgtttattactgtaatgattcctagaaggaaacttgtctttctctgaagacttgtggggctaagagacagagctacttgtctaagacttaagtctttcccattgccttttcatttatgacccatcagaacctacttaaagcctgcagtcctattttggatttacatatcattgtgttattacttttaaataatccataatatttaagaatgtccctttgaggaaagataatcagatacaaactgacatactttcatattatggctcatagattttcatattatagctcacactaaatcattaataaatcttactttgaggatttgcttattttcatcttcattaacaccaacgcagttaaaaaaaaaaaggctccatcactattttactgtttttggtcaagataatagtctatttttgttacacttttgatgcattgatatatttttcatgtgccatatttatatgagatatatagttattttgtggcatatgtcataatcatatgtcatatagcacatttttcttcttgagtttctttgacctcataactcataaatgggccagtaacctcaatgcatttaaaggagaaagaagtcttttaaatcatggaggaaaacattttgtttaaaaacctagacataatgcaccatttgtttcaaaacaggattgcttttatcctttgcagttatggcccttcaagaaacaaattttatgtaatgaaaagaatgtgataacttaagtttcagatgaatgaaaatgtattcaaaactttgtgagtgatacctgtgcctatttacacagctcagaatcttaaaactgttttgactttaagtttagatcatacaaatcataattgtgttctataatagtcattaagcattgatcgaacttttcatttttaaataaaaataggcattttatggtttctttcacatatctttttgtttctagaaaatgaggctagtatattctttggggtatatatggttaaaaatgaaaataaacacaaagaaataaaatgaattaatcagattatagcatttccttgctaatgatgcatgagtatctataatgatataaggtggtaaagaacattaacaaaagcaagttgattttcaaaaggttagacgggatttgtacacatcagaactcagaaggataaaattattcaaggcagagttaatgaaattcaaatgaaaaggattaatctgaatgagtacctggattttgcataaagaagagaaaatgaacatgatatttctaattacactgatttttaaataactgtctgaaatttttattaaaccaaactgaaagtcattcaatggatgtagttttctcattatagattcgcatgactgtgtcaataggaatgctatacttttaaggaatagatagcaaactagatctccaaatgtctggttctcttttgattcaatttctggtagtttcttgtatatgaaaattacaaaaaagtctatatattaaacattattgtatatatcagattgctataataaatgagaatattcaaacttaataacacggaattttctagaaaatgagttcacagtttcccagtggtgtcaaaaagttattttggaatatttctatttctcaagaaagttcacaggatcaacccttagttttctctagtcagctgatctgtaccacttagtgtctgttatctgtgatgactggacactacgtatcaagatagtaaatctttcaatagatccgtcttcattaaatatatttaaagtataacattaaccttttagactttataacgtatagctgaactgttgcccataggtaattgtaatgagaagcatcttagaaattacaggtattctaatttatctttataatggaaagaaaaatttttgaaagattacttaattatcagtagttgaggatagaaatgatttttctcattcagatttttctaaagtaataaactatacctttttattgattatgttcaaccataagaattttaatatttctaagtgttctagaaaatgtgttcatgccatggctgagcatgtagggattatttccatgtattgacactggttgctctatggcttatttgtgacaatcttgaaaataatcacaatatgcatattattagagcattctcaacctgcagttcaatggctaatatttcttttaagagtatttcgatcaggttaataagagcttcttcattatttaaaagtttgtaaaaaatgatttctagaaccagatacagaattacaattatttgtcacttaggtatctaaaattttcttaaaaattgaactcttgtacagagagtaaaaggatgattaccagaaaaattggcaatttaaatagatgccacataacactcttctaaaagagattttctttgaaagataggtgaaaatggtttttagtttaatgttctgaagaatatttgttaaatcggtatataataatctatggtagacacatggggtcaggtggagagaagcttaacagatgagaagccagggtatggtgtgctgcctacattctttaagccctggtttaggactatgattaacactggatcttatttgctgagacacagaattctggtctgagagcacgaattattattttctaagtgaatctaatttttattttatccagtgtcactgaatgattttttctttttttttttaattatacttaagttctgggatacatgtacagaacgtgcaggtttgttgcataggtatacatgttccgtggtggtttgctgcacccatcaacctgtcatctacattaggtatttctcctaatgctatccctccccttgccccccacccgccaacaggcccctgcggccatatgttttcattgttcaactcccattatcagtgagaacatgcagtgtttggttttctgttcctgtgttagtttgctgagaatgacggtttctagtttcatccatgttcctgcaaaggacacgaactcattcttttttatggctgcatagtgtcccatggtgtatatgtgtcaattttctttatccagtctatcactggtgggcatttgggttggttgcaattctttgctattgtgaacagtgctgcaataaacatacgtgtgcatgtgtctttatagtaggatgatttataatcctttgggtatatatccagtaatgggattgctgggtcaaatggtatttctggttctagatccttgaggaatctgcacactgtcttccacaatggtggaactaatttacactcccaccaacagtgtaaaagagttcctatttctccacatcttctccagcatcagttgtttcctgactttttaatgatcgccattctaactggtgtgagatgctatctcgttgtggttttgacttgcatttctctaatgaccagtgatgatgaggtttttttcttatgtttgttggccgcgtaaatgtcttcttttgcgaagtgtctgttcatatcctttgcccactttctgatggggtcttttttttcttgtaaatttgtttaagttccttatagattctggataatagccctttgtcagatggatagattgcaaaagttttctctcattctgtaggttgcctgttgactctcatgatagggtcttttgctgtgctcttcagtttaattagatcccatttgtcaattttggcttttgttgctgttgcttttggtgttttagtcatgaagtctttgcccatgcctgtatcctgaatggtattgcctaggttttcttctagagtttttatggtttcaggtcttaggtttaagtctttaatccatcatgagttaatttttgtataaggtgtaagaaaggggtctagtttccgttttctgcatatggccagccagttttcccgacaccatttattaaatagggaatcttttccacattgcttgtttttgtcaggtttgtcaaagatcagatggttgtagatgtgtggtgatatttctgaggcctctgttctgttccgttggtctatatatctgttttgctatcagtataatctgttttggttactgtagcattatagtatagtttgaagtcaggtagcgtgatgcctccagctttgttattcttgcttaggattttcttggctatatgggcccttttttggttccatatgaaatgtaaagtagtttgttctaattctgtgaagaaagtcaatggtagcttgatgggagtagcattgaatctataaattactttgggcgctatggccattttcatgttattgattcttcctttccataagcatggaatgtttttccatttgtttgggtcctctcttatttccttgagcagtggtttgtagttctccttgaagaggcccttcacatcccttgcaagttgtattcctaggtattttattctctttgtagcaatttttaatgggagttctctcattatttggctctctgtctgttattggtttataggaatgcttgtgatttttgcacgttgattttgtatcctgagactttgctgaagttgcttatcagcttaaagagtttttgggctgagacgatggggttttctaaatatacaatcatgtcatctgcaaacagagataatttgacttcctctcttcctatttgaatatctttctttctttctcttgcctgattgccctggccaggacttccaatactatgttgaataggagtggtgagagagggcatccttgtcttgtgccagttttcaaagggaatgcttctagcttttgcccattcagtatgatactggctgtgggtttgtcataaatagctcttaatattttgagatttgtcccatcaataactagtttattgagtgtttttaacatgaaagggtgttgaatttatccaagaccttttctgcatctattgagataatcatgtggtttttttggtcattggttctgtttatgtgatgggttacatttattgatttgcgtatgttgaaccagctttgcatcccagggatgaagcctacttgattgtgatggatatgctttttaatgtgctactggatttggtttgccagtattttattgaggattttcttttttgttgtgtctttgccaggttttggtatcaggatgctgctggcctcataaaaagagttagggaagaatttattttcttttgtattgcttggaatagttttagagggaatggtaccagctcctctttgtatctctggtagaattcagctgtgaatccgtctggtcctgggcttttttttttttttttttttttggttcgtaggctattactgcctcaatttcagaacttgttattggtctattcagggattcaacttcttcctggtttagtcttgggagggtgtatgtgtccaggaatttatccattttttctagattttctagtttatttgcgtagaggtgttgatagtattctctgatggtagtttgtatttctgtgggatcggtggtgatatcccctttatcattttttattgtgcctctttgattcttttctcttttcttctttattagtctggctagtggtctatctattttgttaatcttttcaaaagaccagctcctggattcattggcaaatctcatttttatttaacgttcctttctgcaaataccaaaatagtcaaaatttgggtttgaaatttcatttaaggaagttaaatacaagttagcagacaaaagtgagtatattttgagtgtctttttcttcattatatttgaccatacagctaagtttcttgctggctataatccacaattactatatttattaagcaccaatatgaatttaagatagctgagagcatctcaaatgaaagtaatgaagactgagaaaactacatatcaaagaagaatcagaaaatagataaaaacatcttagaattatttttcttttaagaaaaagtgatgaggacatgcatcaaaacttttctgaattcccactgcttttgttaaggccacccagatttttttctaaatattttcaagatatgtccaattctgaaacaactcccttgattaaacaacaaaacaaattaataaataaatgaaaaactacaacttgtcttctacttactctgttcctgataacaaaaacctttgttttccaaaaacttacaggtgtaaaatgtatcattaaaggcagatttaattgcaccattaaataagtattataagaaatacgcttgctttagatgatgtgaagctatctttactgcaggggttatagcaactaacgtgaataagaaagacgagcttattaacttgtaaattttattaagaacaacataatggtcaccaaccaatgtaatgcgtgcaaaacacaagcttgtgttacttgtgctattgattctactgtttaatgtgtcagtgaaaatttcacattcaaatagcctgctgagttatttttcttttaaatgtgtaaaatgcttatgatgaaatagtgaaattaagaatttcttaagaaatctgttaaattctgaattttatttatcaaactctggctcaagtttctaatatccttttaaatgtaaatgagaaatatatatacattattccattgaacatgaaggaatgtgtgccatggatttggcccagatatacacaataaaacaaatgttgtaaaaggtataattatttaatagctaatttgtgcaattctgtgaatttgctatatcacaagtagatgagatatctaaattagaattacttcattttttatatcatgtaagaattgagtatgaaaatcctaggtcagagaaattaaaaacaaaacataaagtgaccagcttgtaaattttactcctctttgtgtggggttcagtctagtatccccaaagtccaatgtattacattactgcaaaaataagtatggtgttgtcataaaaggctgtgcagtaataaatggctacgttagcatgcttatcgtttgtacttccccagagaccctaccactgaaaccctcaggtgacctcatcaacaggcaggtggcagttgatcaattctagacaaagttattgggagaataatttcaattacaagaattttgctgcctatagtgtagacagaagagagcacaggtcatccatctttctgaatttgcctgccaagtagtatttattttttgctcttataaagaatagggaaagatgtattactgggaaactccaaaaggactctggagctggaaattctcatcatgtctagcacttggatcccagtcagaaaagtgtaggtgcaagagaagaggctagtgctcccttatatatcaggacattctggagttctttttaaaatataaattccgcagtcagttctgctcatatagcagcttcattagcagcttaacttagcaagagactagcaacaaaaacaggagctaatgtctagaatttggaggagaagagggcttaatacaaagttacataccagcctaactacttcgtatctgttgtatctcagtgaactttcctatagatacaggaaagttgcctgtgttaggaataaaacagatatgagtccccctcacccaatcccatatctagatttccaggaaaattagaattttaaatgccagttgcaaattagaattagaaatttaaatgccggttgcaaaaatcgtctttttcttaggataaaactactctccttatgacctcatggtctttcgtcttatatttatggtgctaatatgtgtgtgtcacttattatgaaatgcttttaacactttctggaaaaagtaggtatataattaataaatcaccgttttactagacttaccatcgtgaggttttgaatccattttcagcccagtttgtagattcaattgtcagctgtagaatgagacctatataaacttaatggaggaggtttcactgttaggaagctaaaaaaaattgttcttttgtatatctataccagcacactgtccgtgaagaaacgatgatggtgatgactgaagacatgcctttggaaatttcttatgtgccttctacttatttgactgaaatcactcatgtctcacaagccctattagaagtggaacaacttctcaatgctcctgacctctgtgctaaggactttgaagatctctttaagcaagaggagtctctgaaggtaaaaccaaagcactttcattcgtattttacaaggtgatcatactgatcattcatagtgccagaacaattgacttaaattgtatgcatcatgatggcattttgactttcacatggaattcttaaaaatacttgatagtgtggttggcttcagaaatctagggtagaaagacataagttagaaaatgtattttacaatatttagctttgagagacatcctaaaatgaagaaatgcacaaaaatgatcatttttacatgcagtagggacagaaaggaaccaccagtaaataaactttgatggaagaacagtttattcctagttaatggatgacttctgtttcattttccaaaaagggaaattagatttttcatttatatgtaatgtatattgtttttgttttatattttttatgtatacatattcaatttcaaattaatgtcaatacctgtgctataacatatggaataaaattgaatagaaatcaataaaatattttctttataactgccagttaaaggctaccaacaaaatccagctgttttcaaaccaccaacagcaagttactaaattctcaagtaaggcaaataatgatgatgaaataggctatgaatttcagaaggcagtgtctgaagataaatgaatgtaggatcaagaaaatgcacataataatgtgtctccagataattttcatgatcgtacattttacactcaaaatgaaatattatagtatacccagagcttggtattttcaaatgcaaacagtatgtgattataggcaaaagatgggtttgctatcagcagcacatattagctaaagtattttatactcaaatggtttcctggaagctcattctatatcacacatttgcctgtatgaatatacaaatggataaagctatttgtttgttttggaaatcggtgttgcagtatcttcagtgacttgactttaatatcttaacattatatcaaataagctataaaattacacagtaaaataagagcttcacagatctctggaactattccatccatgtcagtgtggcactgtttcttattctgtttgaagtaaaagtcaaatcacttattggtacaatgaagaaaagaaacctaatcagttaataaaataaagctgacatgccagaattcctgtcattatttctattaactaagttctcatggcagcatagtttgtaagtgcatcattgtcattcaataagtaaattattgccaatgagctaatatccattccttcccaggttcatggacatttggttcaggagagtagtgaccctgatcttattaagttgcccattgaataactctgtctccatacctcttagcctggcatactcagaatgttagacccttggctacactcacagtgaatcatttgttcatcctgatctatttaatattattatagctgatgtcaatcgtaatagtattgattactgcggtttataatatggtattattgtagatttaatttagctaaatggttgaatccccataagatacagttgtgggcatgattccttctgtctcccaacaaatctccagcaggtgaatgggcttcctaccttcattgacttttttgaagggggatagttttgagctcagtcttttcagtgaatatgtatttcctgttaaaggcattcatcattgtcattatccagtagtaaaaatggaaaagcagtgcataaattgtacagctgctggttgggaaggtttgaaattgtggttgattttattcctgacagatatgcatgaatcaaattacagaactatagtaagtattgctgtgctttaacatacatcttttttgaaagtgcagtacaacacaaataatatgtaatatgttaaaagaattactttctaaacaaaatacaactaaaatagcacgtatggtttcaatagatgtattgaattggaaagctacctaatcatgttgacagagactatgcagataaacacaaacatatatatatacgtatatatatatacatatgtggaaatctgcatttaatagcaaaaacactagctaaggcagagctagagaagaatgagaaacatacacataagtaatattttctttcttacttcagagccaatattaacagttaattgattgtgattgcttatatgtacaaagttaataatactcataacagacaagagtacataattttagaagaattgcaattttttggaagtttagagcaatattaacttgcatttcatttttaagaaaaaatcattttcatgataaaattttccaaaatataattactgtgttaaaccgtcaaatcctgccttaaagtatctcatatgaaagcatgaacacagaatttcttagcatcgtaagttttaaattaccaaaaggttttctctggagagagttaaatatttgaaagcttatcctaaaagcagaaatgatccacttaaaagacttaactgaaaggatttatcatcatgtgtccatatgcctaattttactgaaagcatcagttttattggaggatgaaacactcttgggatgtcacccatatcatttcctgactcagcatgccttgtactctgactggtagctgccagatccaagtgtctctgactgtttgccttagggctctctctagtaatcaaagctcatgagtgtcaggtagttaaagttctgcatcccccgtgttccccagcaaacctcaaccaataacaaataacttttggtggataaataccactactcactcattcttcagttagggtaactctgaagcatgatttatgctctgacccaaaattctgttccaggattaagaccccatcgcacacagtaaaaacctgcctcataggatacatttcacttgctccctgtcctaccttacacacactttactagcacctccttggatcattcccaaagacatcccttgtcttcgaatctgcttataggggaactctatctaggacatttttgaaataaataatgacatatttactgtgtagttagcatttacgtagagaaattcttagaaatagttcatgcctttggagtggaattcttcaagtgattctgctgctccctcattcagggaatccttagctgttcaattaggccttggtatcaataaatgtgaatttttaggacaaaaataagaacatagcttataataagaatgacaactatgctttaccttttgcaataatgagaatcaatttacagctaatattattctttatggtagagcagaatgtcttcacctgaagaacatgaacaagacaaggatatctgcccacatcccttcaatattccacattgcactggagtttcaaatcactgaaaggaggaggaaggaagggaggaagtaaggaagaaagagagtgagggaaggagggagggagaattgaagaaaagaaataaaataaggagagaaacaaggaggaaataaatggaaggaaagaaaaaatatcaggcacacatcatttcagttgtctcatcaaaaccaattatagtacagatgccttgtttggaatgaataaaatgtgctatactttgggtaaccaagagggtgatgaaaaacgtggccatatgaagaaagctcacgggtaggagacatggtggtcctaatgtagattttaaataggatcaagaaatagagacaacccttgttcaagttcgagaccacaagggaaagctggtagtgagcttataagccaaagatagtgtgaagccaggtcgttcaagtcctcttgagttcaggttttttgcattgctcttgagaaacaaaaaattgttaggacaagtaaacctaaggaatgtggattcgtatattccaaaaatagttattaagctcttagtatgtaccacacactattctaagtgcttataaaacagtgaaaaagactaacgaatctttgccctcattcagcttttattataacattgggagacagaatagaagcaagcaaacaaagaaaaatgataagtaaatattgcgtattactaggtgatacgtattttgggaaaaaaaaaaaaaccagaatctgttaaggggatataggaccactacaggggtagacgtaggtataattgaaagtggcggaattgccatttcaaatagggtagaaatgacctttgagcaaagattggaagaaggtaagggagtcagccatggagtctgtgtagaggaaatagagtagaggcccaaatgtgggactgagcttatcttaatcaagcaccaacaagaaggccaaagtggctgaagcaaaacaagccagtggaagggtagaaagagatgaggatatgggagttgtgagtgtccagattgtggagggcctttggggccattgtaaagaagattctaaatgagatgagagcaattgtaagtttctgagcagttgagtggcatgatctcaatcatgttttaaaaggatcacactggcttctgggttgagagtagaactgtaggggaccaataatagaatcaacaagagttgaaaaagagatgctggtggcttggacttggtcggtagtgagagaatgtcagattctggaaatattttgaaattagagatagcagatatatttctctggtcatacagaaacttaagcatgtgtctatgaaaacccattctcggccgacttggggctgagttagaactttggtctcgtaaaacctagcagaagatcccttgagagatgtatgatttcttctcatattttagtcttcgattcttcagtcttgccttgaagtagggacaaaagtactggcaacagagatttttaatacactggttaagatctttctcctctggaatctgtttcacagctcttaagcacaaatttaataatcccaattagttaaatgaaggcaaaattatgccatgagcaaagtgactgcttttctattctggtattaggagaattagataatagcaagaggcaccatatgtagaaatccaaacaaaatatctgaaggaaaataaaagaacgattgtttatatgcgtattgtaatacaggggcatattacattgtttatatgcatattgtaatacaggggtatttaataatattggaataagaggacattgcaattactctaaataatcatggatcatataaaatttcaaagcaaaatttgtttgcaaatgctttttgaattcgagttgaattttctaatagtttaatagttctaacagtttaatgcgtggaaaagatgatttttattaatacattgtgactttgtagaaactgatcttttgaactatacataaacatttgcaataatgtgatcagtggtttctcttagaaaaattgagtttttcaacacatttatttggttataaatataatttgtttcttcaacagcttatatgacttgggatttatttgattgatttgctatatataaatgtgtgtattttcaaatattaatcattaactgtagtttaaatcatgcttaaattatttccatagtacattatttttcatttgtattatatgaaaagatttgtactatagagaagagattatagatatttactgcctttcagtcatgcccagctcatatttatatgtgcttcggtacagttttcttttatattttatacaaatctctcttgtaggaaattatccattctttatccccaaccattattttatcaagcctagcagttgtcctaccttgactattatgctgcaatttactcccaactctgctaaaatgtactttaagaacgcactcctactccttccattctcccagcagcactgttttcataatccccatcgtgtaaagtgtagaaagcagaaacttccatattaaaacttacaaatcatgaggctggtagaaattttgaagttgcagttaagttgtggggaggttttccttttattcacaaacggttgaagctgtgcttcgaccagttataatgtcgttttttatgtgtgatatataattactgattcgttatttatgcaaagacaatgcatcatcctatgaagaatattttggtccaaatacgtagctgtgtttagaaagtgttttctcacatggggacaataaaccatgaagaaaaaattaaaaggtcaccttaccatagagccaccaaaaataactttttaactttttttggaagctccgtaaaacctagttaataagtactttaatgccttttgattgaacacagttcccaattcgatatgtcattaatgtagtgcctggtagctggatgggatgtgaagagtgtaagaattagatttatatagggtgttgcctttatctgtcagataaagacaaattccagagagtgaaaatgaactggagtttgagtctttggttctcttatttctctttttccattttaagatagatctactccccaacggccgctgtcacaacagttactaatgggtttttctaatccttttttcttagaaatgaaagttatgtgctcctctgttaaccaagttacaaagtgtctcaaggcatttctgatacctaaaactgcttaaagctattattttcaccttcccaaaatatgacgacaatagtgcctagagttttataagtctataaacactatacatgcatttaagtatatgtataacccatgtaactgcagtgctacatttttcaagaaggtgatacatacacacagccaccaggaagaaaaattagtatcttgtttgttgtttttttcctccaccactgtatctagaactcctagaacagcacctagcacttaaaggtactgaatgtacatctgttgaattagtgagtgatggtctgatacatgtaggtgtggactctgagatagaagaagacagggcagtgttagtaagcgctggtactaaaagagaaaaccaaatttacttctttttatattgtatcctaactcactgagttaaatcatctagacatgtgcattctacaaatctatatgcatataagcatgaagaaattgttctaggtttgtatatactgaatctaaaacaatcatttatgaaaatgtgtgacagggaacccacatataattaaaacattactaacatttttccacatcagtgagctttcattatgtggttatgataagcagtagagtagagagtttagcaaagtactgtattggaacctgaaaagcttagaaagatttaacctgattgttgatagttgtacccttgggcaagtaacataagatatttaggcctgttttttaacgttgaaattaaatcagtgataataactgcccctgcctactcaactgtactcttgtgaagatacagtgaaatcatgtacgactgtgtaggaaaattcctgttaaaatgtataattatataaatttcaagatttgtaaaatgcatattgcttcatcaaacatcccaaattctaagaaagttataaatttccacgtaaagtatcctaaaaacaaattacctttaagaatgtgttaaacattataaaattgcatatttatatcttaaaaaactgtaaataaaatgttaaccacataaaatatacgtaaagttatttccagatgtggcaaatattctaaagctaaaaaaactttaaaataagagaatacatacaagctaagccacgtttgcttttgacaaaatcttccttagaggatcttacaaacttttgatcatattcttctattgtacagaatgttccttgacttgtgatggggttatatccagataaacccattgtaagttgagaattttgtatgcggaaatgcattcaatacacttaacccaccaaatatcatggtttagcctagcttaccttaaacatgctctgaacacctatgttaacctacagttgcgcaaagtcatagaacacaagacctattttatagtaaagtgttgaatatctcattcaatttagtgaatactatactgaagtatggtttcgaatgaatgtatatcactttctcaccaccctaaagttgaaaaatcactaagtagaaacattataagacgggggccatgtgtatttccgaggctagttgttacttattcaggagtaatttttttattcttctatttatttaaggtataaaacaaataactcactttattgtatatttatcttgaggtgcagaaatgcaactctaaattattccaagattctgtgtaccataacttttaccaagaagaggatgctgttttctagcttggttttaattgttgttttattttgggctttagtttctttatgaaatgtgttgatttattttttccatttctagttcagtaacttaaaacccattgttctaattgtgagttcagaaccatgacaaaaattattgaaaaatattgaaactctaagcaaagaatgatttaatcagtagtgtttttttctcttttttgctttggagtcttgaaatttgcttttgttgtttattttttgttgtctttcctttgccatttaaaaaagttagtttgtatttattttctcctggttaaatttgtaaccatgaacatattaaaattataatgctattccattgaaccttatgaattgtcaagtctttcaaaaggtttaaatattggcaatatcttatagtttaatacaatgacttgtacccaagtctgcttatttctgaatattaatatatatcattaaacatcctgatggaaaaaaaacaagaactttctgttgtaaatcacgtatgattaacagacaccaattcccaaatttaatttgccaaaccacaggcaaaaattaaatagtgttatcagtaaggaaatctatggagcttccaaaaaggtaaacattgagtagagtgttagcttcctgctcccatatcatgccttttgtttatttcttttctttcttttttttttttttttagatgtatgcatttgggtacagaacaattgtatgaaagagcgattttgcttttctgtcccctgtgtaaaacaatatgatggaaagcacatttccccaacatcagaagtattagttatatataaaacgggcataatattaccaaatatgttttctgttttaccaaaatagtttactgtcatcaatattaatttttgcaggtttgattatattttatcatgtatggtagctacctatgaagttgcttaatcatttatactaaattttcatttatcaaaataataagatgctcatgattgcatatgtaaatagaattaaaaagtataacatgaattttaaaaaagcatattccattcattggtgatcatcagtttttgaggttttcttggattgttgtattgctttggaatttttcctccataaaacctacctggccctcctctgctgagtcacacaacactaaagcgtatcctgactctaagaaatttgggatcatagaatgccatatattttgaactaagagaaaagtacttacttctataaaaccccctttgccatgcatgtgagtcaatttttctatttggattttctgtaaaatgatttaggcgatgtgtacaacttaacacaaaatgtacgtatcataaaaggactggtaaaattgttttcaatttacttagtgctgatggactagaatcattttatctgagaaacacttggatcagtaaagtgcagggttttttttgttgttctttttgttcttgttgatgctctgtggcatctggagaaatgggcaggtgtaattctgaataaaggacttttttcttagatatctaatgtgctgtgaggaaaccataaggaaactcagccaggaaatgcatgtggacttctattccactgttcaacagctaatgtcttgtaaaagtaaagtagaataaacaaggaattacctgaatagctcacgtctgaccatacctgaatatctatctacaatggttgaacagagtaacaaatcttagaggttcaatgattgaattcaaattggattttcataagcaagttcaactcaactttttacttcaagtcaacagatatttattaatgctacaagtgctatgcttaacattctaaaagataagaaagaaatattaaggaataatccttgtactctggtagttgataacattattgaatatacatattatagttatacaaacaagttagagagtaataaagacattaaggacatcatccaagcaaaaatatataagacatgagtgtaactgaaatcatgaaaagaagaaagcagcacaaaaagcagaaactaggaggaattttatagaggaggaatccttagcttgaggtgtgaatataactggaatctggactaatcttgaatgtaatagctgacagttattatttttgtgccaggacacattctaaacacttagagtaacttgtatggtcatcataacagccctacaaggaaggctgtattattatacccatactcagatggagaaacggaggtcctgagcagttaagtgacttgctcaggtgagatcatttttaaatatcatagttgaagtcccactctggatgttcaagctccagagtttctgctcttaagcactacgctatacagtttcttgatgcagaaaatgttttcaaagttaaagatacaaagtcagtaagggtaaaaaaaaaaaaaattgtatcagaaggatgtgtctgaagaataacaaagagattaatccttcactttgttattcactttgattatcctttcaagtgtctctgctggcaaagcactaggaaatcaagttggataaaaactgtgaatccagttttttcttttttttcctggaaaaaaagatgggctaaaagatgggcttgaaagtgtccaaaaagctatatgtcatcatggatggattttggtcagggataatccttaaaatggcaggataaattggacacaaggaaaaataaagagataaaacaataagtaaggagatatttgtgttcagcatagctggaccgatttataaaccatacccttgattcagtagctgtaccaggactctcattattaaagttcactcaggagatgcccaacatcctagatcacccattttcctgtgttagtgcaaaatgtggactggatttcccgatacatatttctatctagttaaataaatactctgattggttaaggaaaggttttctggaaggtgtatataatcccaccatggcaacagaaccaagagtctctgactgtctaccaacctgtagacttgaattttttccctgtactttcttctagcttcttcgatttctgttatccccaaaacaccttgatgtagccttaagcagaatcaaccatcaaagggctaactccctcctcctgctgggtgccttctctgttgggccccagcagcagtgaatctatgctcccaacttgacatttttcttatcccctttcccacctcccctaaataaaattcctttgtgtcaaagtttgatttaagtgatagaaatggctaagattgtctacagggttgggtttggaagaaaagaggtctggaaagggaatatagcaaaacatcagtattttctgagcaagtttggaagagattaaaaattacccctagtgactctcaaatttatatctctagtcaagattcctctcctgaatcatgacatatatatatatgccttttatatattcacttagaagtataataaacatcttaaatttagcatgttaaaatcttacaccctaaccttatcctcctgcagttttctacactatagttaatggcaactccattattccacttgtctgtgccaaaattcttcatgttatccttaaggcctttctctaccaacacacatgtaattggccaccaaatcctaaggattctgcctttacaatgtatccggaattcaaccctgcctccactctgatccaaagcaccatcatctccagcatggatgattgcagttgtctattaacaagtttccccctcattgccttctcccctgtagactctactgtcaatatactagccagagatacctatttaaatggaaagtcagattatatccccctttctgcttctgttcaaaacccccaatgctccccatccccctcaaagtaaacagggaagtccttatgttcataagtaccttcatgggttacccaccccattctctgatatttctctggtagtcgctagctcatacactccagccataatcacttcctccatgttccttggccactcctccaggcacattccagtgtcagggcccttatacttgctttacctgtctggaatattattctcatgatttttctttcaatggttaatttctgcatttccttcagatctttacttaaaaactgccttcctggtaaggtcttccccgacccctcttacctaaaattctgacccccactttatccttcatttcttccttccctgctttagttttgctcctcagcacttaaccactatctaactgagtatatagtttagtcatttctctatttgtttactttattctcctgtagaaggtgagattccagagagcggggcttttgctttctggatcactagtatatacccaagatataatatatgactgtctcaggctgggcgcggtggctcacgcctgtaatcccagcactttgggaggccaaggcgggtgaccacagggtcaggagttcaataccagcctggccaacgtaatggaacccgatctctactaaaaatacaaaaaattagccgggcatggtggcgggcgcctgtaatcccagctactcgggaggctgaggcaggagaattgcttgaacctgggaggtggaggttgcagtgaacagagattgcgccactgcattccagcctgggtgacagagtgagactctgtctccaaaataaataaataaataataaataaataaataaataaataaataaataaataaaatatgactgtctcatggtaggttttttcaacaaatatttcttgagttaatgaatgaatacagcgatgtagctgtcagacacagagagagaaacctagaagatagtattactagttaaaactagtgtggctaggtctgtatgatgaaaactgtgcctaactgtactgaatcctgccaaggagggaaagatgaaatggggaagctattactaagtgagtgaataggaatttccttcaggaaataaatatggttaaaaatgtgaattataagtgcttccagctgtctgctaatgttagtccttcagagaaatgaaaactgagaaaccattagaaagcaattttatcacttcttttaaaaaataaagttcaatatatttcaaaccagaatatcatcgaaatactgaagtcattttcaggggaaaatgccctgaaacaacaatttcatattatcttatattttaacttatgcttttatacatttgaaattttatttcatttgaagacttttttctaattgaaatttttgactgagagaacactcacaacttctgatgtaaaattttattactgaggaaaaactgttaaacagaagacaaattagccaattaatgtttgtatatacatcccacagtggacatattatttaaaatcttggaaagagttgtagatttgtgaaggtatatgtgagcttatttctaggtatgaaataagggagcaaagacacttgtaaattatagacatccttatttagtaattggatgttgaagatgaagaaatggctgaattgaatgaccacagagacgggacagaggaagtgatgtttgtttgtttgtttaattgtttattgagacagagtttcactcttgttgcccaggctggagtgcggtggcacagtctcggctcactgcaacctccgcttcctggggtcaagtgattctcctaccttagcctcccaagtagctgggattacaggcgcccaccgccacacctggtgaatgtttgtatttttagtagagacagggtttcacatgttggtcaggctggtctcgaactcctgtcctaaagtgatccacctacctcggcctcccaaagtgctgggattacaggcgtgagccaccgcgcccggctgctattttaaataatagaactttggcacttttcacagtattcgggaagcaacgagctttgctataggtacaaaaatatatttaaaacttcagtaaattattttaagtttactttcatcaaaagtgattaacagtaagttcaatttgtcagatattactctcccctactctagttctcttcaggttctgcaatatctactttgacatttatacacataagtttaccatttagatggtaaaggcaggctctgcaatgaaaatctttgacagcaagggagtagttgtcactttacattaaatggaagaaaaactaaacagtagaagtctatcccttatgataaagaatggagcatagttaagggttgcttcatacctttatcttaaactgattagttggcaaataggtcccttgtttgtttcctagataaattttctgtattctctggcttctccttttatcctgttaaagacacatactccacaacacttgaataaacaaagcatttttatgttcaaattatttctgtatgtgtctcctttaaaaaccaattatcttcttaagggagagactcacattttaaagtctttattttcatatctcacatttgaggctgatattatgtctgtattatcaataaacacttatttaaacaataagcttttcaaacagataaatgaattgaagccacatggcttatagatttctgcttttccttactttaggtatctggatttcatctgccggttgtaaaagttactgtgctatctaatttttctctattcacagtgcataatcagggtcttctttaacttattggagactgtgaatcagagatgcaaatatcctattttaaaatattaaggactcgagttgtataaattcgtgtacagatgcctttcagaaattaaaattccatttgtatgtatatttagaatttccttttgcagaaagagtggccaaaaataaacatcttacagaatttcagcggaatagtgaagtggtcaattcataggggcatgtcaaaattaagaagggatttgactaaaaagttggtactttatcattttgacatcatattttcagataagataaggaactattcagggagagaaatagaaatgctatattctatagtgattctagggatgtttatatcgccatagcaactacaagggactatggcttcctttttagagggtcagaaactataaagatcacttatttctagacaaactaaaatagtaaaatactatcagagatctcatctctgactttaaactatggaaagtgctacagcattttctttggtgcacataccatttttctgtgtgcagtgccttgaggacacgaatatgtgcagggactttaaaaaggatgtatttcctggactccagccaattttgacagcattctctgagaatgcaccaaggagctattatctagatatccagggagtgtgacatcccctgccccagtttttgctttttgcttttctcctttaagatagaaagttttcccgcgttagtaacatgctgtacagcattgctaaaaccgttcataacttgatgctgagcaatgctacagcattccaaagaattggtagctccccagagactcagattaaaatcaggaagctttgcaagctcaaatcctcagagagtatacatacacacacatacgcacaaacacacgcataccatatcaaagccataactggataacttttatatgctgatggggaagatcctttatctcttcccttgaatgtttttctccatgggtgcttacagctatgcatttaaagggtttgggcctgctatgtactaacaaatgtgattggttgcccaatgtgaatttaagtaatcagcctttcattcagctggagtcttggtatcaggtggaggacttggcagagttatgtatctttgccattggactggcagccaagcaagaatgatggagacagtgacttaaaagaattcagagttgaatcaagtacttgtgaaatcaggctgcccaggtcaggcaagttaacagaagcagccaagaagatatgttggtgcacgtttctggtacctgacctaatcaggctagcggagtagccctaaacattccacccaagactccaggcttggagccatcagaagatggtagtaaaattctaccaggtaaataaaagtaaagaaataatactagagatacgcttgagttcaatggcttttagggcattaataacaggtattacatccattgtatctcttttattataatttcaagtgtattttagattcaggaatacatgtgcaggtttgttacatggatatattgtttgatgctgagatttgggatatgaatgaccccatcacccaggcagtgagcatagtatccaacagtttctgttttattatgagttttgtttttatcaatatgaaacttttcttcaataagcaagcctctgatgtcaaatacagcatactgcaatgtcgtacaaagctattttctattttatagtgaaagatgatgacagcaaaagacagtctggtctgcctacatttatgttttccacttccaacatgctgttgttgctctcgataagatcaccaatgacctcctaaattgcccgagctgacttttccctcctggtcctggctgcatctgacttgttgacaactccctccctccttctggttctcttcctgggtctgatgactattattctttagggatactcatctccttcctctgcccatgctttccacataggttcatctttatgctacctttcttctcactcttttcaccctaaacacctttcctgagcaatctgaccatccctagtcttattcaacatcacacacattccaatgactatcaattctctatgtgaaattgctaaaagacagttttaacctgcattcctccagataagtaaattctcagattgtttctgtgttggcttgttctttcttttgtatggtaatacctgacctgtcagataagtactttttccacagagttaaattgaggtgcgaaacaaaagaaataatgaaagctttccatcacaaggtgtacatagactggaagagaatgccttgaaattttattttaaaaacaccttctttctctgaaattcactcacatcacccataaccattgtatcttatcctgttgctgagctgataaataagacacgagaacacagttgctttttataaggttcccattgtaagcattgacttttaccttttacaactgacattatctgtagtctcacctgcctcttcagcttagttcttgctcaaggcaagtcctcgtggaccacaaacgtgaaatcttagaataaggcagaaaatcctctaagttttattgttaacttctttcctgtttccctctctgattgtgaagttttcttcagagcccgtcatctggaaagctgtacgatcagcagcagtcactccctatctaacacagtctccaacttacaaatgattaaaatgcttcccaattttgactgaaaataggcaagaatattccctttgttttgggaggctgaggcgggtggatcacgaggtcaggagatcgagaccatcctggctaacacggtgaaaccccgtctctactaaagatacaaaaaattagccaggcgtggtggtgggcgcctatagtcccagctactcgggaggaggctgaggcaagagaatggtgtaagtaaacccgggaggcggagcttgcagtgagcctagatcagaccactgcactccagcctgggtgacagagctagactccatctcaaaaaaaaaaaaaaaagaatattccctttgttgatatttgttaaaatttatatttatctagtcaggaaacataagatctctggatgagagaatacatcattaattactcaaaagcatctcagggcaagatgtttatctgtgagtgcaggggttgtagtacaggagagaaatcccagaattgtggatcttggagattatatagagcacctgatgtatcaggaggagagaaagtgagagagacagacatacaggaagacagagactttgctctgggctataaaccaatgatctaggtctattatttttggaatataagttgaaatgtaatcaaagggctcttggagataaaagtttttaaatctctccagagcaatgcactaaactccaaggtacgcttgccattcagtcaccctttaagacagttactacaactctttgctcagaaagcctagtccatgtatccaaatgtgaaaatatgtatggctcagcaatccctgccatcttactcctcttctcaaaatctgatttcaactgcctctggaacatctacagtttgatgcctcaaaggcttttcagaatgaccatgtccaaaattgaactgatcacttatgcacacatacacaagcatgtaaccatggaacctcttcatctgtctgaaatcctgttacccaatgacaccacaaatcatgtggatgcccaggccagatacctaagactcattcaagttcttcctcttcttcacccaacacacagtcactgaattctgctgagctgttttcctaaacttccttcccacttcagctcaaatgtgaatagcaactagatacttgattcaattaatgaacttttgttaagactgtaggtgtgttaatggtattatatatgtactttccgaaaaaagttctcatgagagaatatttcagcaagagaaaaatgctgaagtatttatggagaaaataatatatcagtttgtttcagaataatctagttgaagaggtgagtgggtggattgtccatggagtcataacagttggcactggattatagggttatgggagctatttgtattattttcctactttcaaatatatttgaaatcttacataatgataactttttaaaaatcatagttccccattagctactgaagtacaggcagaattttctgttgagattcaaagcacattattgaacatcctcagcctctgtttcatgccccatcttcccctaagcttctatgttactgaaaaggcagccaaatatgactgcgcttgttacctagctttgcgtgtgtgttacctactagctctaatgttcttcccacttctactactcagatatgtctactgcaatttgcaccttcttcgtgaattctttcctgagcctatgaccaaatatatgatacatgttttctctaacttctagaaaatgtttggtaccacttggaacactcatttcttccttcttctcatccagctaaggcttctatacttggatttttttcttcaattcttcaaaccatatcctttcttactactacaataaaacctacttaaaacttcttaaaggcaaactaaactgtgtttcacccacctttgtttctgctatattgctccttacacatgggaagaactcaataaattttgctcagtggaccttatgtataatttagatgatcaaaataacaaaattcgtactaggaagaatagccagaatgtagtttttagcaaatttattgagaataaatatgtttagatttttctttcttcccgtataacccatttgtggtttgtgatttttccgttaaatagaatataaacaaaacattatggattaaatttatgggaccatctattcatttattcaacaaaaaagcttttgccatctatcatgtgccaagcacaggtttgagctttggaagcccaacagataacaacatccctgtagtcatagatttcaaattagtggtatataccggctacttgatatatattttaatgttagtaataagtactataaagaaaagggaagagtaatgccaggaataaagagtgattgctggtgctatttaaaatagagtagtagagaaggcccctttaacgtgagaaagaagtaagggaaccactgatagaaatgtgggttaggaaaactatttttggcaggtagaacagcaagggcagaaatcttgaagcaagaatgtagttgttatactcaagtaatgcaataaacctaatgagggtgaagtgttgtggactatgaagagactgggaagagatgagcttggaatggtaggtagtatacaaccaagtcatgtagagatttataggtcatagtgaagattatgcttttttaaaaaaagtaaaagcaagtttattaagaaagtaaaggaataaagaatggccactccgtaggcagtgcagtggcatgggctgcttgactcaggatacttgtagttatttcttgattatatgctaaacaaggggtggattattcatgagttttctgggaaaaggagtcagcaattcctagaactgagggtttctcccattttagaccatattgggtaacttcttgacattgccatgcatttgtaacctgtcatggcactgctaggagtgtcttttagcctgctaatgcattataattagtgtataatgagcagtgagaaggaccagaggtcacttttttcaccagcttggttttggtgggttttgactagcttatttacagcaacctgctttatcagcaaggtctttgtgacccgtatcttgttctggcctcttatctcatcctgtgactaagaatgcccaacctcctgggaatgcagcccagtaggtctcagccttattttacccagcccctattcaagatggagttgttctagttcgaacgcctctgacatatttcccctctttcttttacaagggaacccttaatcctaagggtagtagagttacccttaggattaagtagtagaagggtaatacatcttctgtaacttcttcaggctgaatatgggtgatgatatttctgcctaactattagggtctcttgtattcagggtagagaggagctcagtcagcaagcatcagcttggtgagggccattcataactgataaatggtgatatctggaagattagtaagttttcaatctaagaaaacattgagtaagcttattctgcattcctatacaaaaagtaaaacagcaaatatattccacaacagtaaaacacaataagtaaaattatcccaagtaaactaaattagaaggctttccgtgaactgggcagctgttggaaccaaagtgatgtggggctgctagctgattccaatacatgcccagaattagaatactgatccaggtttttatattacccatccttcttgtttcttctgaggtgcagtcagagatcactggcaggttcacaggaataagcaggatcagtctatattgcaggaaaaaactcaaaaacagctgacgagactaataacaggtgtaccatagttcttaaaacataatttttttctctctccagtctcccatttttactaaagatggatcatcataggactgatttgctttattatacttggcctgattatttgtataaagtgttgcaagaataattatttttcatgtaggcttttgaaattggctgtgattgaactctgtgatgaagagccaccagaagattttgagcagaggagtgatatgatcccaattatgttttaaaagaatcttttcggctcttgtgtggagaattatccagtaggggggaaagagcggaagcaagaggaccatttagataggtagttctataacccagatgagagacaataatagcttctatcagatctgtagcaagaaaggtagtgagaagcagtcaaattctgcatatgtcctgaaagtcaagccaaaacatttgcccaataatttgaatactggagactgaaaaaattaaggatggctccaaagttgtcaatctgagtaattgttaattgaattactataattcaattgaaatcagtaattgccatttactgaaatgagggaatctatgggatgagaaggattaggaaatgcagttcagaattttgtttgcgtcatattaagtttgaaagtctcgtgagacctccaagtgttgagaaattagcatttgttagactggagttcggaggagatgtccgggcttgagatacacatttgggtgtcattgtcttatataagatatttaaaattatgagaacaaatgggatggattatggacagagaagaaaagaagtgcaaatactgagtcagagcactctaatattaagatcaggatgagaaggatccagcaaaggaaagcagaagaggtcaggatacagaagccaaatgaaggcagttttaagatgtagggagcgatccactctctcaggatgaggtctgtgatttacctattgaatttgaacatgtcaaagtcactggacttcatggttattaactttaaaaagtcaataattaagaattgcaacaccatttgctacctttgggatttgtatatatatatatatttttctctttctatagacagctaattcatttttttactgttttaaaatttttatattacagaatataaaagatagtctacaacaaagctcaggtcggattgacattattcatagcaagaagacagcagcattgcaaagtgcaacgcctgtggaaagggtgaagctacaggaagctctctcccagcttgatttccaatgggaaaaagttaacaaaatgtacaaggaccgacaagggtaggtaacacatatatttttcttgatacttgcagaaatgatttgttttcagggaactgtagaatttatttcagtaccctccatggaaaaaagacagggaaaaagaagtatcactctcattgaaaaatggtaagtaaaatgagaacaaataatgatgaacaattcagacaaatgagctgaactgtagaaattattcagtattaaatttagcgttatgttgaagcattatatcttctaaaatttcaggtaatcgtaaatcagattggggcattgaggtgctataaacagttgttcgatataacatatttatctttagtcaaatctgtatctacaaatttataggagtttgatacttagattaacatgtttaaaatactacctatcaataaaaaaattgattttcatttatttatattttggagggtgacactttacactttgcattaccctcccccacatttttttttgccatggggaatttgttaagttgatttaaaatcatgtttctttttatcttaattgaaatatttagctgttgacttaattggggggtggcagaaattcaattacattatttagcttcacatcacaagaagtggattactctttcttttacatttttagattaaaagtaataaagttctctaacagcttaaagtgattcatttcagaagtctttatcctcaaggtaggcttcttaattattctcagaggaaatcaaatcattcgtctaataattatagggaacctccatggtatctcttacatctgtccatttctaaccatctttactcctattttagttcttggtttactacatcaggcacctaaagagagatttctagcattaatctcagttgtctcaagtgattatctccactttgttctcaacgatctttcagtggccgtcatttttctaaagtgtaagagctttggtactataatctcattcccttgagaatgaaaccctgactccttaattgtgcaaaattatctggtcagcctcactgcttatttcttcgtgcctgccctatagcaagcccctccaattatgttctagcgatattaaatcaatttgcagatgcccaagtgttttgtactccctctgacctgcctgttcttcaggtctcacttcagatgttgtctttttctagaaatcctaaaactattagtcgctcctaacatctggaaacttggatattgtttcatcatttaatgtaatttaatatcaataaatcatttatgcatttgtaaattttccagacttggtggctaccgtgtagaatatatgatctgatgtgcctgctcctaaaacctaacacatagtaatcaatttgtttacttttctgcctcccacacaagctccttatagaaaagggctatgttttatttgtgttatatgctcaggactgatatagtgctgagcacaaagtgggtgttcaatgtgtctggactcaagcctcctctccgaaacctgagaatatttcccctttggatagtctaccagatttatctcactgcaccttccagggcaggtgcggtggctcatgtctgtaatcccagcactttgggagtccaaggcgggcacatcatttgaggtcaggagtccgagaccagcctggccaacatggtgaaaccttgtctccattaaaaatacaaaaatgacctgtgcgtggtggcatgcgcttgtagtcccagctactcgggaggctgaggcaggagaatcccttgaacccaggaggcagaggctgcagtgagcccaaatccaccactgcattccagcctgggtgacagagcaaggctccgtctcaaacaaaacaaaacaaaacaaaaaaacagatttatctcaacttccttgaaaatagctggtcccacagtatccaaagccaggcttgataaaggcaaagaaactcagccactctgtgtatatgctacaaatacaaacttaaacttataaaatggtggctcatgcctgtaatccctgtgctttgggaggctgaggcaggagggtcacttgagcccaggaattcaaggctgccacgagccatgattgtgccactgtactacagcctgagtaacagactctctctaaaataaattaacaaaaatatttgaataaacttatatcgccaccatggtgtactttctcccagcatttcacattgagacattatgaggctctgcgggctactccaatgatgtcagtttcattaccatcttttgggatgttcattccactcttgggaagttcttccccctctggtttgtcttcttatagtcagtgttttctccaagcattctaggccacccacaccatcccctaaggaccgttgaggtttcttggatagccagtgattactgtgcttctatatacacctaccagttttgcactaaagtagaaataacgctttctgctttttgaggtttctcctccgctttactcatgagtaatttttggcaaatgatccaggtattcccttctcactgggtcatatggacatttccctttcagtttaccttcaccttagacttaaacagaaacactaacgccattccacagagagggtcgctgaaatctcaccccaactctgaggacttttctggttttgacaaaggatagagtttctctagccccaatagatccaccctgtccttatccagaggttgaaattgtacttccattgacattctataggaattggtcaggagctgttaaatttcctatgacttttagtacaatctcagatacaaactgttttaagtaattgcttataagcacaggctctagagttccaacccgttttggaattctggcctttctgctatctatgtgcccttgagcaagtctcttaaatcttctgctccatacatttctgatgtataaaataggataagaatagtgtctatgtcacagggttgttatgaggattatctgacacaatatatgtggggagcttagtgggttgcttaaacacgataatggctcagttaaggttggcaattttgatgatgaaaatggtgatcttatggttctgatagtcatgatatctgttaattcattcttacatgctttcaaatttccctgagaactacagagagaagaattagactcagtccctgctttgaagagcttcacagtcttggagagaaaaggcacaaccagccagtaaaataagggttgatagactggagctgtacaagagggcaagaacaagatccctggggaatggaatgaagctatcttactaagaatggggaataagtcaaggtctatagaccattcaaggttctgagttacaactaacagaaagtgactctagttactttaggtagaattatataaattactagaaggatatcagatacctcatggaatcaataggaaagcctgagagctaggtttaacaatgggcagaaactataaaggaagagcaggctaggcatccagaatatatctactatcaagctatgaggtaaatctgaattattttgctgtcatgccagagtccattgctttaccaggagcaccattgcactggacattgcttgctatcgtcactgcaaaaaaaaagtatctaaattatttattcttgctgtgtgtcgctcattctacaactagggtctctggcagaagcatctgatagtcagaggatggatatttttttctgtaaaggggcagttagtcgatatttttgtccctgcaggtcatgtagtctctgtcacaactactcaactctgctgttttagggtgaaaaaaaccatgtataatatataaatggatggacatgttgtgtttaaataaaactttatttaccaaggcagatggcaggctggaattgctgatgggccatagattgatgactgctgttacaatacaggtttaggccacagaactaggttcttattgccagagatcagggaaaataaatagctgaatttgttcttcattgtagtggcagtcaacacctcgtgtcctactaagtcccatacaatggtagattcttgaatccttggagagatttagaagctatgcattcctgaatacacaaatgttcagtacagccttcatgtggtgttctcaacaaaaatctgctgagttttttagtaagccaatttgggttaaatcaaaataaatttgagctagtaagaagggctatattggtatttttcttaaatggtacatgtatggtagtattagctatgaccgcaataatgctgtgacacaaatcaccctagaacttgctgactgaaaacaacaggcatttctggctgtttaggttacttgtaccttgactgactcagctgggcttggccgggaagctctgcttcaagatgtgggttagtagagctaggttccatgatgcatgttggattaaggtctgctatatatgtctttgctctggacctaagatgaagggtcagtgacatgttttcatgaccagtcaccaaagtataaacctaaacctcccaagaacactcatggcctctgctcctgtgaagttcactgacatttgattggccaaagcaaattacgttgccaaatctgacatcaatagaatgagaaagtagactcttcctacagtggaaggggggagagatgttaatatttgctgaaccataattcaaattattagagatagttaataatttataacaggattgttttacagctagaaaatgccttagtggttttgccctgcttcattattttataagggagaaaactatatttcaaagatgttatgtgacttgcctaagcacatactaaatagtacatctgcgtatttctcgttcagtcatctctattaaatgtcataaggtaaaacagacattacgctttagatgagaacaggaagatatttaaaaagccagactaatttatgactgctcattcattatctaacatacctgcttccatacattgtctttcagcaaatagaatttcaacatgtatctcaacaagttacacatcatcaaagtattaaaagccttattttcacggacattctgattgttcactaacagtcaacacagtcaacagtaaatccacaagcaccatgaacgtatggatagatatgcctatatgtaagattactagttaactttttgggaaattaatattactgctaaattcagttttcattgattttcgggtgggtaactaactgcttataaaatatacctataggaaacatgtaaaaacaaagaatttacataagatctatctgggattagagaaacaaagctcttttcttctttcaatgaacacttaagaagggcctactaaatgtcagatgttatactctattgtcgttagtttctttctgataccatctttactatcctgtaagccattagtgagtgtttcccacttttagaaaatgacttcccaaagactaagagggtagaacagttcaaatgctatcatcaaaatgaaggcagtttctagactacaaattgctgtacagccataagatggcattattgtgtaacaacaaggtccctgtcaaacatcaagaaagtaatgttttaaaatcagtatttccttcttggaattctacttagtcagatatgttgggttgacttacccacccatataagtagttaaattcaagatggttctgagctttagatatgatgtaaaatagacatgagactaagagtatttatttctatattattacatttctatagcaaaaaaagaaacctctaaaaaaattagagaaagaagtataagggcatttaattaatcaaatgttcttattaataatatttcataaaataaaggaaatgttgaaaaataaaatatgaacacagtgttgtataaagtaagtcagaaataagagaacacttactgtatgaatctattatatgaaactaaaaaattaggcactttggagtttagaggtcagataggagttacctttgtgagttgtgattaacaagggctgaagcaggcttctagggactgggtaatgttttgtttcttgatgtggatgctgcttgcattgatgtgtttcctttagggaagtttatggaaccatacacttgtgatgtgtacacatttctgtgtgaatgctggactgaactaaaatttatacttacattttaaaaataataaatatgtactttaagtacaggagggacataaatcataattgttttaataaagaaggtgtagctttaggaaaagcataccgcattgttctatttttggcatttcaccatggacccctgaacattttataattgcccagtacagcctgtcagataaatatgtgggcactactgctttagagaaagtattttccaaatttatcaccaccattctggaaccacagttccacaggtcattaggatgctgagggtgggacagttggaagctgcttccccagggatttctccattgttcagttctcatagcagtaagcctgcagcattaaagcactcacaggctctggctgccatttgtgctacatgaagaaaaatgagaaaatgaaagaaacgaaaggagagaaaacaggagtagaaaccaaataaatcagattcgaagagaaagtccctaatcgtctctgtattcagacagtagggaatgagcatgcaattctgcaagcccattcctaatgtgagtttctgataagaatttgctatctcagttgtaatctttctactgagacattcaataaataattttctttcatgtcaaggtaaggaaataacctcacattacccatataaggaaagaatagtatactaatcctcacgttatcactatagaattttatcttttaaagtggaagctagagggacagatgcataatctgggagcttttccagaattgtttgttcctaaatgagacattcagctatagcagcattagcagcctcttctatttgtcacaatgccatatgtagttgggaagatacatgataagcacatacaggatgctgacaactcacgaaggattatcattgcagtcttagaattaatctctaccatatttgaagatttttatgcaagactggatcttcattccacaacccaggtataggtatatgtgccaatacaaaatacttactgttggtttctgagcttggtagaattaggaagtaaggggtaaaaaacaagcaagtcctgaacttaagaaagttgttcatatcctattccatggccactgttttactgactggaagaaaggaatcccgtggattcagtcatggggacaatgcagaagaagatacagtagacagacagagaagtacaaatttctatttatgttccacttttcaaaattttttatctttaaatgttatttttaacgtttgtgggtacatagtgtgtatatatatatatatatatatactgtatatatatatatatatactgtatatataaacacacatatataaatatatactatatataaacatatactatatataaatagatttactatgtatatacacacatacatagtgtatatatgtggggtatatatatatgtggggtacatatatatatgtggggtacatatatatatatgtggggtacatatatatatgggttacacatatatatgtgtatatatgtggggtacatatatatatatggggtacatgagatgttttgatataggcatgcaagtatcatggaaaatgggatgttcatcccctcaagcaattattctttgttttacaaacagtaaaattgtatttttttaattgtttaaaaatgtacaattaaattgttttgactatagtcaccctgttgtgctagcaaatagtaggtggtgttcattctttctaactattttttgtaccaagtaaccatttcaacctccccctcaacccccccactacccttcacagcctctggtaaccatccttccaccctctatctccaagtgttcagttgttttgatttttacctgccacaaataaatgagaacgtgtgatgtttgtctttctgtgcctggcttatttcatttaacacaatgacctccagttccatccatgatgttgcaaatgaaaggatctcattctttttatggctgaatagtactctattacgtatatgtatcacattttctttgtccattcatctcttgatggacgctcaggttgcttccaaatcttggctattatgaacagtgcttcaacaaacgtgggagtacagatatctctttgatatactgatttgctttctttgggatatatacccagcagtgggattgctggatcatatggtagccctgtttttagtttctgaggaacctccaaactattctccattttggttgtactaatttacattcctgccaacagtgtacaggagtccccttttcttcacactctctccagcatttgtaattgcctgtcttttggatatgtcgttttaattggggtgagagaatatcccattgtagttttgctttgtatttctgtgatgattagtgatgctgagcatattttgatacacctgtttgccatttgtatgtcttcttttgagaaatgcctattcgaatcttttgtctattttctgatctaattattagactttttcctatagagttgttttaactccttatatattctggttattaatcccttgtgagatgggtaatttgcaaatattttctccctttctgttggttgtctcttcactttattgattgtttcactgcggaggagctttttaacttgatgtgatccatttgtctatttttgcttttgttgcctgtgcttataggatattactcaagatttgttttacccagacagatatcctggagagtttctccaatgtttccttgtagtagtttcttagtttgaggtcttagattttagtcgttaatccattttgatttgcagttctctgatggccagtgatggtgagcattttttcatgtgttttttggctgcataaatgtcttcttttgagaagtgtctgttcatgtccttcacccactttttgatggggttgtttgtttttttcttgtacgtttgtttgagttcattgtagattctggatattagccctttgtcagatgagtaggttgcgaaaattttctcccattttgtaggttgcctgttcactctgcatcaattttgcatcaatattttttgcatcaattttgcatcaatatttatcacatggtagagttcagcagtgcagccatcgggtcccaagcttttctttactgggagagtttactaaggcttcagttgtgttactcgttactggtccgttcaggttttggatttctttatggtttaatcttggtaggttgtatgtgtctaggaatttatccattacctctagatttttcaatttgttggcatatagttgctcatagtagccactaatgagcctttgaatttatctggtattaattgtaatatctcctttctcatttctgattttacttatttgggtcttctcccttttttcttcattagtctggctcaagatttgtcaattttgtttaccttttcaataaaccaacttttcgttttgttgactttttgtatgttttctttattacaaagtcatttatttctgctctgatctttattatttctttcttccactaattttgggttcgatttgctcctgcttgtctaggtctttaagttgcattgttaggtgatttatttgaagtttttttcttttttgatagaagcacctacagctgtaaatttctctcttagtactagttttgctgtatcccataggttttggtatgtggtttttctttcattttttgaagacatttttcaatttccttcttaatttcttcatagacccagtggtcatttagtagcatattgtttaacttccatgtgtttgtatagcttccaaaattcctcattgttgatttctagtctcattccattgtggtcagagaagatgcttgatattatttcattgttactgaatttttaagactgcttttgtgacctactgtgtggtctatctttgataataatctgtgtgctgagaagaagaatgtgtattctacactcattgaattaaatgtcctgtaaatattagatccatttattctatagtgcagattaagtccaatgttactactttggttgagcttctgtctgggagatctgcccaatgttgaaagtggggttgttgaaggctcctgctgttattgtattgaggtctttctctctcctgagctcgaataatatttgctttatatatctgtactccagtgttgtatatatatttgctttatatatatatactccagtgttgagtgcatatataattgttatatcctgttgctgaattgacccttttgtcattatataatgaccttctttgtctcttcttacagtttttgtcctgatatcgatttggtctgatataagtagagctagtccagctatgtttgggtttccattggcatggaatatctttttccatccctttatttccagtctgtgtgtagctttataggtgaagagtgcttcttgaggtcaacacaaaattgggtcttattttttcatccattcagacactgtatctatttttcttttcttttcttctctctcttttttttctatctttctttcttttcttttctttcttgagacagcatctcactctgttgcccaggctggagtgctgtgacaggatctcagttcgctgcaacctccgcctcctgggttcaagagattcttgtgccttagccccccaagaggctgagattacagtcacccacaatcacgcgtggctaatttttgtatttttagtagagttggggtttcatgatgttggccaggctggtctcgaactcctgacctcaagtgatccacctacttcggcctcccaaagtgctaggattacaggcgtgagccaccatgcctggtcgagacactgtatctctcttgattggagagtgttgtccaggagctgagcctagaaatgggtcctcacaacactgtccagtgccctatcctactgtgactaagctggtatccaagatgcaagacagaatcctctttacttttcactctcctctccttaagcaaaagtaaggagtcacttttgttactgtgggctgcactgcttgaggtgggggaggaatggtgcaagcactcccttagccatgccagctggtgtctccctaggtcacatgccaccctagtcctctagctcttagcccaggctatgactagaagttatctaggaattgcagttcgtgtgtcccagactgcctctcaggtttacctgggactccagagcactttggcccacaatggtgaggcttgccaagaaacttgagttctgactgctgggatgggcgattcccttctggctggggctagttcaaatattccctccgtgcacaggcactgactgaggccagcatggcttttttctctactgtgacagcacagcagttagttcaatgtaaagtcccccagtagctgtactgtcccttccaaaagtgcaaagattccctctctgcactgcacgtccagtgctgggtgattgggaaggtgtggtgttggtgattcaagactgtgtctcctgcctttcctcaatgcctcttttagcaagatgaagttaaaaccaggtaccatgattccgtacctggtttttggttctggtgacagtgcttttctgtctgctcatagttgttacaatttgatgtttcagtgagggagattagttatataggcttctattctgacatcttgcaccactccgtctcacttttttgaattgttgaaaccatggtttatggggaaatgttctgttctggtttttaccctcaagatcttctttgaaaatcatgatttactaagtaactagttggatagaattcatttttaagaaaataatgaataagtagttcccttagatatagcaagcaatgttcttataaactgacacaccaaaacacttaccagttcacctaaacactgaaagtatttaaaaatttatttttaacctttaagtttttctccatttgagtatcttgtgcactatacgctctcctacatatgtctacaatctttggtctgatttattttattggttgttgaatgtcagaaaccacctgaattttgcttgtatatataatgcccagtagagtgcacattggtaatcaatacgacttgatgataataatggtaatgaacactataatttgatagcatcaacttggcatgtatgccagaaataaaccatcataaacttcgagaaaaacaagtctcattaatctgtcatttattataatctccctccatcaagcgtagcctctatatactgtcttttttgccatatgtaagtttcttcttgtatatttcagattagagcttgcctcctcccacacactatcttctatttcacactgctctgttcaagtgtttatgtttctgctgaaggctgtataatctaagataatccctagctattgtaaatatcattcactggccagtcattgcattttgcacaccactgagagagtgattgtgagccaaatagaggagattttgtttccacccagcaacccaaaatgaattgtgtgatttgactattgatgccaattacatggaagttttactaccagaggcaaagctttaaactgcaaaagattaaccccatatagttggtgtcatgaggtatttaatgtatattggactatcaaagcgtctccttacaacaaaccaattatcaatgaataatattcttatcttattgtgacttattgaaactctttaaaaaacatgaaccattcagcacactataccgtctaaattagatatctaaactagccttcatttacatttccttgtttagttttaaatataatttcttctgaattcttagttgttaagagcaggtggtgaaagaatttaaagaagaaaatttgttgtatttattaagtgaaagagctttttgaaatgcattaaatagaagtttgtttctgcccatcagcttatcttctgcatattcctatttatagttcaaagcacttaagagttgcagagtgatttgctttttatgatcaccgcttcatccaggatcatttgccttatatcttcaacattttcagattcttataaatcttcacagttcacttagaggttagtttaaaactttcttcagataagaaattgactagatataaaattcacataatctcagagttagccatagatcaatatccccagtctttttctcaaagtaattgaacatttttgtttcccaggatagttgtatacaagcattttcatcctcaccatagatgattcttgttcttcagtatatgaggggactgtatttgcctgcttgttatctaaataaacatttttattattgtcaaaggaaaaagactctaatacagaaagaaattttgtgtccataggactagcctcattttggaggctgatattaatatttgactttattcattgtgtatttcttggttttgtcatttcacaaatttcccttctctaaatatgcattttttctctacctggaatagatgagttttaaaagacattactgtaaaataaaactgtgctaaatgtacttttcccagaaactctctttattttatcaattataatttgctttggctaagtgttacagaagctcaaggtagaaatgacttaaataaaagagaagcctatttctttctcctgaaaaaccctggaagtttgcagccaaggcagatatgttggccccgctcatttctgttttctactgagtgagttatctttacttggtggaatttcatccacatgttgcaagatggagctctcatgacatccacattccaagaaggatgtaagaaggccagaagaagggtcaaagggtgcataccaattgtcttttagggaagtttcgtgggagctgccatgttatatttccacttacgcttcattggccagatgtctgtcacatggccacatctaagctgcaagtggggctgggaaatgtgtttatttcacatgtgctctgctaaaaactgttcagtcatgaaaaaaaaaaaaagaatattggaagagaactaacagtcttcaacatgtatatttaaaaagagcgttatttttcttttacttatttatttttttttgagtgagagtgttgctggggctggtctcaaactccctggatgaagtaatcctcccacctcagccttctgagaagatgggattacagaggcacaccactgcacccggctcctgttttgttttgttttgttttgttttatttaaggagccctaagaagagtgtaaaaagggcaactttgtctttagttaacccttccctttttttttctttcctaattttatgaactctgattcagcccgcatcttactctggcttactaaattctgccaatataagagtagaagttttcatcatttccctaggtacctactcttctgtttctccatattctcaaagtaatttctcattcatcaacttttgtctgacttagatttaagctactgcttaggaaatgtgagaaatggagaatttggttgtcatagcgctcctacttagagggctaatgctttcctaaattttactaaagttggatcctaagttatataagttacctaaatttaattagcaagttttgcttactaattcactgactaaccactataaaacaaggacctaagtttaaagctgatattatgacaatgtactgaaatttcaagacattactttttctggacacgtaggatggaccttgcataagataaaagagcttatttttaggcacacctatgtgccaggcatgggttcagagccttacatatatcatttcattctcaagagaaccttaattttagagacgaataattttgagttttagaataaataattgtcttaagctcacacatgaagtatgtgccagagtctatatcgtgaccccagttatgaattcttttccactacatagcctgcctccatggcatttcacataggatttcttatgctcaaggattatgttcttccttccagatctatagacatcagtagaaacaacacaaatacgtataatgactttttaaagtctcatatacaagaccaaagtactttaaaaagatgtttaaatttttgaaggtgatatctttatgttcgagatcagtagcagaaatggattgtaattcattacaagatgcttagcaaagccaagtggtaaaggattttctgatgtgcttgaggagtcctgacttgctccttagcaaattcctacacaccattcagcattcagtgcaaataccacctcttggaatccttctctgttcttgatcaattattccattgtctggattcatagaactctctgtttacctatttatcttacaggttattatcatgagtttatatgtcttacatagctgtttgcaacatgttaccattcagtggagtactttttcctacagggaagaggctgtactatataccttttgtcacccctaagtggaatgcagtatggtttcatgttagatgttcaatacatgttaatattttattgatgagcccttaaatgtatataataagcttctcactcaaaagctgtaatattctagaatgaataagtttcttgagaaactctttggttaacagaatctccatttccatcatagtgtattcaataaattattaatgcagggtaaatttccttatatttcctttcatttcgctatactaaggtcaaatcatgacttttaggtgtggatacagcaatatataaaataatctaagacctggatatatgtttttctaattagggaattggagatacatgaacagtctctcatagagaaaaatatatccattagtcactaaagtcagtataacattctggtgaaaggtttgcttgcttgcttgtctgcttacttgcttgtttcaccttctattctaggaggatgtttgtcacaattatgaaattctaacgctttaaaaatctgtttaccctatgaaagttgcaaattcttgcctgtaaggcaattttcacaagaattattttcatattagttttagtttatccgtggatagtctcaaattcctcttgaaaatatcagtgttctcaagggaaaactgcccattacaagccacagatgtggttttttgagagatttctgcctgaaatacaagttttaaaatattctttgtagtttcctagtatggctagatacttgtaggaaatgacaatttagatgcacatttgaaaattcttagcctttgagtaatttatatgtttgaataaatttaaactatctttgttcataaaaaggcaaattttgtctgtttgtcttgaaatgcttttttagtttcttcttcagttctttcacttgtctttctgtaatattcaaaattatagcatagtacttgaaaaccaaggatggtccagtctgtgtcctttgttttgaaggaattttggaatcatcagagatataattctggaatttctttgggtaccttccataaaatagtagcatcctgataaggacgtagatgctaacttttatttttatctcattttctttcccctatctctcagtaatgtaggagtgacccaaggtagctgtttattgggccctcaccaaagtcaatcaatattagtcagctacaaccacaataatgctgtgtgacaagcataccccaaaagaacaataagcacttatcctcatattcacaggcctactttgagtaatctctgattcagaatctgactgtaggttgaccaaacatgtctgatctatgtgtctcattctggggctcaagctggaatggcagtagatatttggggcacattcctccatggctgagttctaaagatctcagaagggtaagcagaaacacatgatggttcttaagacccagatttataactagcgttctctcttccatccatagtcaattgtcaaagcaagtcacgtggcatatccaaagatcagggatagagaaatacacttggcagttagtgaacccatttcaagagtgtgggtgtataacactactacaaaacagaactgagacttgcaacttgaaataccacaccattctagtagaattttattacagtattaattaaacatttttgataaaacacagacaactctgttagaaagcccaacttacaatttgttgatcccacttggaaaggtattctgaatccattttttcacaagttttctttctaattcaatgtgttggggtacttttattttacccagaaaagtaatattataaagcataaagttaatgccccctgtaaaaatagaatactgaaacaaactttaagtcacaattttattatttactgacttgagaatctccttgtgcttcagcacacttggtagttggatttccaaatagcatcatgactttccatacccagctgtctgctgctcaaaactaccataagctgactatcacagctcacaggatacccttgaagaagaccatctggtttatgtctcttggcaaaatttgtttaaaaacaagcagctgcatgacaaagtaagaaagagtctctgtctagctgtggtaaataagtagctttgcaatactcataataaagcatttttctaatccaagccaacatcttcaaaaggaaagcattattttcttacaactgaaagaaaaatctacagaattcagtgatgagggaaggactccattaaatttgtttcagcagcttgagatagtgagaaaaacaaaacaaaataaaaacctgtttgtgattagatacagtcttgtaataactagttttaaaagtatttatttagaatctaatacttggatattattttaattctttatattaagagatttacatttcataaaagcttgtcctttgaaccctaatactcatattgtgatggtgagccggaatgagtaaggtcacttactatatagtcggtatataataattcgttgaataactctctctcctcctgttactggcagtgaatccatacgggtcttcagcaaccttaattcatgcctcctcagaagaaagaattcgaccaaggaggcataaggcagaagaagagactgaggcaagtgttagagcaggaatgaaagtttatttaaaaactttagagcagaaatgaaaggaaataaagtacatctggaagggggccaagtgggcgacttgagatattaagtgtcctgtttgaactttgatttatggttttgtattttggcatacttccatggtcttatataccttctccccaattcttcccttggggtagggggctatctgcatgcacagtggtctgctgacacttgggaggggagcatgcacggtgtatttactggagttgtattcaagaggtgttcccttaccagtcaagtgtttccagaggaaggtcgtataccagttacactatgacattttgcctcttagtgcgcacgcgggagcccatttgcccaactcctgcgatcttatcgggaagctgctgatcaccaatttcaggtgtttttatctattgggagactgcctttccctggtattggctgtgaccaattattattttaaagacacagtttaataaccacctgactgaccatcacttgatggttgcctgacattcctggttggggtggcgggggtggggggtctcctaccctgctcatatctgactagctatctactgtaacactactattaggtatgtctgtatcccattacactcactctctattacaaaaaagagtaccttattcatttttcaaaagaatgagtgaattttctgctccagttaagtgcttttccttacctctatgtagagtgtcaaactagccatgcttaaggattgattctggtattaataatataaattcttgcattatgagtgtctcagtttgggttcttacataagcaaatcctgagacaaggatgtgagttcaaatagtttctttgggcagtgattctaggaagctgtggtaggatgttggagttgtgagaaagttaagagaaagcaacctgtaaagagtatgttatcaagccaaacaccactgtgagaactagggcttaattccctggagaaagtctgggaaggcataaaacacttgtctcagagttatcttagacaaggtgcaggagctgaggtgtttatatttcaactcttgttagtcacttttaaagggccgctcagggtgtcagggtattaatttcctcttgcaactacttccaacctgtttttgcatgtggttgtagctactttttctgcgtcaaagatagactttaggctaagacatgcagtttccggctgtaggacatcaaccagagtaccctggagtgtccaggcccaagataatgggtgagctccacctggatctgtggcaatgtgagggaggggcattattaccctagcaagggccactgcacttccctatccagctggtcactcttctgcgtatttgtgttacttttctgactcctgcattcctctggatcctgattcaccatcagcttttgtattctgaggcttgtgtggctgtgtctttctatttcttccttattgacttacttgtttaatcttttgctaatgtatacctttgatattcctatgtactcacctttggttagctctgtgaattattgagtcttgctttacagctttaaaaagatcatagccatggtttgttttttaagtgtgattcataacagttagtgacaaaattagaagtggaaattaaaggtcacgtgcacaatcctacacaagccaatttcttgaacgacataaaatacttgaatttgtcttttactatcaccaatatagaaataatttgggggtatttctcaaagtattgatttaacaaaactttatttttgtgtgaagattttttcaagtctcctggaaattattcaaattattgtctttaaagtcaaaggaaaggttaatattagggttacttttctttggtcacagaattgctggaggcttctatgacttgctttgaagcagctgactttatgcacagttttggttagaaattcactaccaattccaacattttcaaagtcctaaaagaccaaaagtacaattcttgaaatatccctagagaaagcaagaataaattagttttcactagaaatgaagacaaatttttctcattagttcattttgcctcatgatcagaattctttgccacatgaaaatattttggttaataggttgtaacataaagagtaatatgaatagagatctagcccaattagatgacagaaaaagagcaaagcttttgaaatgtataaagaagaaagtttaagagagacatgaacaaggctggatgtagtttaaggttgaagaacacagaaaaatgagataagtgaagttaagtgaaaatccttcccttactgagaagaaagagaactcaaaattatgtgaaggtttttgttttactttgttttgcttcttaataaggaaacaacagtggcaaatctggggcattaggaatggtggaacttctataacagtgatgtttcaaaggtcacaaaggaaattaaattgtagattgggtttaaaagcactggaattacttccagccccattttttcaggattttgtatgtagcaggaaatagatcaccgcatagctaaaggggagaatttaggttttaactggtctcagtgcaaactgcttcatagttcctttgcatttggtggtgtatgtaaaacatgaaaggtataaacatttattatcataactttattattatacaactatttattggctgcataggaccatgtgtcttcttgcaggtataatcaaaaataaaaagacagaaatgtatcttatatgaaggctgccattatcgctcttatcaatggccataaaatcagatttcttacatgtacaacatatgaaaatatattaaatatgaaacgttttccattaaataattctgtaaatgattttcataacatttctgtccatgatgtgtaaatctgtagatcaaatactgcaagtgtacagaacttaaaatgctttggtcaaaaaaattctcttattaatatgacaatggcgttcaaaagtaaaaaggtaaaaatacagtttagcattaataagtaaactcagaaagtaaaatatattgatcatacagtctgtattagtctgttctcatgctgctctaaagaactgcccaagactgaataatttataaaggacagaggtttaattgactcacagttccacatggctggggaggcctcagggaaaacttacaaccatgccagaaggggaagcaatcacatccttcttcatatggtggcagaaaggagaagtgctgagcaaagggggaaaagccccttataaaaccattggatctcatgagaactcactatcacaagaacagcaccatggggataaccgcccctgtaattcaattacctccaactgggtccctcacatgacacatggggattacaggaactacaattcagaatgagatttgggtggggacatagccaaaccatatcatttcatccctggcccctcccaaatggcacgtcttcacatttcaaaacacaataatgccttcccaacagtcactcaaagtcttaactcactctagcattaacccaggagtccaagtccaaagtctcatctgagacaaggcaagtcacttctgcctaggagccataaaatcaaaagcaagttagttactttctaggtacaatggaggtaccagcattggttaaatacacccattccagatgggagaaattggcccaaacaaaggggctccaggctccatgcatgtcaaatccaatgaggcagtaattaaatcttaaagctccaagataatctcctttgactctgtgtctcacatccaggtcacgctgatgcaaggtgggctcccacagccttgggtagctccactcctttggcgttgcagggtacagcccccttcctggctgctttcacaggctagcattgagtgtctgtggctgttccatgcacacggtggatcaagccctcttctcacagctctactaggcagtgccccagtggggactctatgtgggggctccaaccccacatttctcttctgcactgacctagtagaggttctctctgagggccccatctctgcagcaaacttctgcctggatatctagacatttccatatatcctctgaaatctaggtagaagttcccaaagctcagttcttgacttctgtgtacccacaggctcaacaccacatggaagctgccaaatcttggggcttgcaccctctgtagccatgggctgagctctatcttggctccttttagccatggctggagtggctgggatgcagggcacctagtccctaggctgcacatagcaggggggctctgggcccggcccaggaaaccattttgccttcctaggcctctggtcctatgatgggaggggctgccatgaaaacttctggcatttcctggagacaattttcccattgccttggtgattaacatttggctcctcgttacatatgcaaatttctgtagtcagattgaatttctcctcagaaaatgagtttttcttttctattgcatcttcaggctgcaaattttctgaacttttatgctctgcttcccttttaaacataatttccaattccaaaccatatctttgtggatacataaaactgaatgcttttaacagcacccaagtcaaatcttgaacactttgctgtttagaaattccttccaccagatgccctaaatcatctctctcatgttcaaaattccacagatctctcggacaggggcaaaaagccaccagtctctttgctaaagcgtagcaaaagtgacctttactacagttaccaagaagtttctcatctccctctgagaccacctcagtctggactttattgtccatatcactatcagcatttgggtcaaagccattcaacaagtctctaggaagttccaaactttcccacatcttcctgtcttctgacccctccaattctctaggaagttccagagtttcccatactttcctgtcttcttctgagtcctcccaactgtttcaacctctgcctgttacccagttccaaagttgcttccacatttttgggtttctttatagcagtatcccactctctgtggtaccaatttactgtattagtctgttctcatgctgctataaagaactacctgagactgggtaatttataaaggaacgaggtttaattgactcactggtttgcatggctggggaggcctcaggaaacttacaatcactgtggaagcagaagcaaacacatcctttgtcacatgatggcaagaaggagaagtgccgagcaaaggaggaaaagccccttatgaaaccatcagctctcatgagagctcactatcataagaacagcagcacgggagtgaccaccccccatgattcagttacctcccactggatccctcccatgacatctggggattatgggaactgcaattcaagacgggatttgggtggggacacagccaaaccctatcactgcctttaagatctatgaattgtttttctacattgaagaaatttgtagacatttgttttttattctctttttggtttgctgagagcagtagtctcttggaagtgagtttcatttacattttttcctttgggtgtcaaatatataaaatattttttaaaatcaatggctgagggataaatgagggttggtagaaagggaaaggataagggttgtagttaacggaccatgttttaatgtgtctataattagatggaagttgtctcttaccattcaacatcctggatggccttcctatagaggacattttcatcttcttttgtcgtccagagctagcatatgtgtttcatgtctttagatagtgaaaatcaattcagattttcatggaaaatgctctctcttcatcctaaagacagaattgtcacggctatttcgtttattgaaaagtgaaacctgctacagttagcatatagttaattccatatatgttacctgtatcatttaatacattcacaaagtaaaaaaccaaattttgccaagttcttgatagtaacaatagtaaaatggaatttctgttggcatattttcatgttattctgaaatgctgaatggatttattaagattgataacaatatgttgtacctttatgttctaaaatttaataacagttattcttccaaacatgccagcgtcctcaatagttgacagtctgcaaaatattctattatgcaatcagccatatctccttcttgagctttctttaagtacttgtatcctgtatttttccctgaaatctagcagtaagttgaagaaatgataaacaaaattgtatcattgtatataatggctatttataaatactgatgtacattttcataatgttatttaaatgattacttcagatatgtatttctgttttctacattttaacttctcaacatattaggttgttatcttagattggattttctaagacatagactctaagacagagatttccatgcagatggtttcttagtgagtgcttttaagaaaaatgcctgggagggagtaaaggcagcaggattgaggagagagaggagttgaatgatgatgcagtgaaatggaagatcttatctggtcccatgtggggttgggatgaccatttagagtattaccgtatgaagcaaggaaggtggaccattgtatccctaatccattagtcattagatgtgagcctcccaactaccagcttccgggcaatatcatcttggtcaaagaagtgcctgtctgctgagagaaatttcttggaagagcttaggtatgatctgttagtagataacaatcccagcaactgggagaatgaatgcttcatttgtaattggtgaatctcggtggcacaccacagtgttcgctacggtaatctttatacttattgagacatatattgtttttaagtaaaacttgtatacctagtaatgcatttaggtagtgtattggccaagctagtcctttttggaaacaatttcattgtggtataaatgatatacaataagctacacatttaaatagtacaatttgataagttttgacatatgcaaataccagtgaaactattagcacagtcaagataataaacatatccaatatcctcacaagtctgttttcggtaatcactctctcctgcccctcccttgattcccaggttaccactgatgctgactggcattatagataagtttgcgttttatagaattttataaaagtagaatcatgaagtatgtaccttatttctggtctgccttctttcactcacaaactactaactttcattttgtgaataatatgatctccgtgtgattacacacattaagaaagtcaataaaaacattgtaatttgattccgatactagtttatgggtctacattatgtatttaaagatactatcatgtttggattagcccttaggtatcaagtaaccctggagttgaggcagttactgttttatttgctatcaatctttttataagctcaccttccactaattacccaaaaatatttgatttaatacctgagtacagaaaaagaacatattcacaatgtttaaattttataatttaatattataatttacaacagtttaaaataactagtcctgaaattgagtatttctcacctaatattctgctctatttattacccactccacgaaaaaatttcccagaaaaatcacaaacatgtctcttgagtgtattattacccaacccacagaagaatttccaaaaacagtcgcaaacattctctcttgagtgcaaccattttctcgggccagccattcattgaaacaaaatagcctgtataacttctgtgggtagacatttgtaggttgttcttttgaggcattagtgctattgcatttaagataaagaaataacgaattcacaaattttataaagttctcttaaatttaccaagtcaatagcaccaccactttgattcctataacctgtgacttagttaggcttctcaattccaagaacataccaccattatttcttataatgtcctcagattaaaacatgtgttgtcctttctttatacctccctgcactttaattgaatattttgccatttactggattctgtacactttttatgttttcatgccctcccttttcattctcctggacatcaatcgcaagtcagtagataccttgtaagagatctctctccacccaaatcactgtttcttttgaaagagttaacctttctgaagcagcactcctgcttcacatttcccagcacaggaaccttcagtgtttctctgttgatagctttgatttcaaacgggtagccccaggagaaaagagagctgaaggatatgttttgcttggctgctttgtttgacctgcaaggaacattaaaaggcaatgaaaccgggcagagactggactgatcaacaccatcagtttagcacttattgctatactttctaaggctttacaattttatgtgtcccacgtgtcccctgaaggcatttgattttctaacctcctaggccagaggctaacatccagaattcatagtctggcacttataaaccctaacttagcttctgtcacttgtatctctatgcaactctacagcaaaatgtacttattttctctaaaatacccttattccatacttctttggagtgtaattttatatataaaagtcctcaccacctgtaaacattaggaagctttgattcgaagaagcagaagccatctccatttaactgaagtgaaatgaaacttactggagggataatgtatagttcttggaaatgaaggaaaagaaggcaactgtggcagagggagggcagcactgagagtcaggaactccagggaagttactttttggatgctgtcattaaaatgcttcagcttcaaattgtactgactctacctttctcaattctagattcaaatttctaaatgtaattggcataaattaggaacttgtcccaccagtttatagagtttacagagcactatgattataggtccccctaagatcatgcagaatgagggaagagtaatttcatccaaggaaaagcagggtaccattcaccaaagagtggagatacttattcagaacaattaatgttagatgccacaaaaaaactaaccctgaaatcaaagtggcctaatgaatgcttatttattgctcatataaagtctgatataaatcaggtagcattccttcacagtgactcagggacctaaattgctttcatcttgtggctctgccatgtcaacattgaaacttcagaggtattgacaaaggagagctgagaaattgacactaactatcaagtacctcaggcaagaagtgatgcatcacttcctacactttcccactttccaggattcaatcacaattgcactcacgaaacctcaagggaacatgagaaacataatgaaatcaataccaagatatccaaagagtactaattttcttcaccacagaagggatattggacagacaaaaaattttgggacagaggaatatccactaaatgatccttccatgccctgctcagatgctacattttccattaaggctctcttgaccaacccataaggagatgatctccaactcctctgaacatctggaacattgcattctacttatttttactgtctcctattgtaataattgttggctattccttattagacaaattataagcttttatgggacggtgatcaaaagtcctaatttatcttgtcttcctacagcattcaaagcattgtagaccttcaatacatagcagtcttcgaagccagagtattagtattttttctaaaactgtattcatcgcaacgaactcgatggatgttcaataaaaatgtattgaatagtcattcatgcagatagcaaatttcttaaaacatttcttactcaatgtttacttatattcatcatgaatataaatttaatataataatatcaaatcccattacatttagtacaaagtaaatataccaataattttatatatgtttaagtgaatttttatatttcatattatttgtgaatgatacacatcgtcgtggaaaatttacaacgttgaagtaaattatacaatatagggtatttgtattaaaatacatttcatagaaggtgctttaaatttaaaaagttagcatgaatacatattaaatgtaaaagagtctttaaaatgaaaaatatttcacacttgtgggtttgatctaaaaatatcagtcgctatatgatatggctagacagatttgagtaggtataattttaatgaataatattgtgtgatattttagggtccaaaattgaatgtttctattaagtaacagatatttaaatgccaagcagaagctacactggcaaaacaagatttagtatgttatcttaagtgtatcctaaatcctctttcatcttatggagaagaaatacatgcttttagtttccagccactcctgtctatattcatttaaaataaactattatttatatcagatatgatgccatgtgagtccacaatttgtagtatagagaaataatttcattgaattattttggctgtttgtacctgagacctgattctgaatcatttatttttctatttaagttgtgctattttatgatcctacctatggctatgttcaaaacaatgacaaaatatattttaccctgatctttttttcattattatactttaagttctgggacacacgtgcagaacgggcaggtttgttgcataggtgtacacgttccatggtggtttgctgcacacatcaacccatcatctacattaggtatttctcctaatgctatccctcccctaaccccccatcccctgagaggccccggtgtgtgatgttccccgccctgtgtctatgtgttctcatcgttcaactcccacttatgggtgagaatatgtggtgtttggttttctgttcctgtgttagtttgctgagaatgatggtttccagcttcatccatgtccgtgcaaaggacatgaactcattcttttttatggctgcatagtattccatggtgtatatgtgccaattttctttatccagtctatcattgatgggcatttgggttggttccaagtctttgctattgtaaatagtgctgcaataaacatacgtgtgcatgtgtctttataggagaatgatttataatactttgggtatatatgcagtaatgggattgctgggtcaaatggtatttctggttctgtatccttgaggaatcgccacactgtcttccacaatggttgaactagtttacagtcccaccaacagtgtaaaagcgttcctttttctccacatcctctccagcatctgttgttgcctgacttttgaatgttcgccattctaactggtgtgagatggtatctcattgtggttttgatttgcattcctctaatgaccagtgataatgagctttttttgatatgtttgctggctgcataaatgtcttgttttgagaagtgtctgttcatatccttagcccactttctgatgggtttttttttttcttgtaaatttgtttaagttccttatagattccgggtattagccctttgtcagatgtatagattgcaaaaattttctcccaatctgtagtttgcctgttcactctcatgatagtttcttttgcagtgtagaagctctttagtttcattagatcccatttgtcaattttggcttttgttgctgttgcttttggtgttttagtcatgcagtctttccccgtacttgtgtcctgaatggtattgcctaggttttcttctagggttttgatggttttcggttttaggtttaagtctttaatgcatcttgagttgatttttgtataaggggtaaggaaggggtccagtttccgttttctgcatatgactagccagttttcccaacaccatttattaaatagggaatcctttccccgttgcttgtttttgtcaggtttgtcaaagatcagatggttgtagatgtgtggcattatttttctggcctctgttctgttccattggtctatatatctgttttgctaccagtaccagtctgttttgcttactgtagccttgtagtatagtttgaagtcaggtagcatgatgcctccagctttgttcattttacttaggattgtcttggctatacaagctcttttttggttccatctgaaatgtaaagtaatttttcctaattctgtaaagaaagtcagtggtagcctgttggggatagcattgaatctgtaaattaatttggacagtatggccattttcactccactgattcttcctaaccacgagcatgaaatgttttttccatttgtttgcgtcctttcgtattttcttgaacagtggtttgtagttctccttgaagaggtccttcacatcccttgtaagttgtattcctaggcactttattctctttgtagcaattgtgaataggagttcacccacgatttggctctctgtttgtctattcttggtgtataggaatgcttgtgatcttttcactttgattttgtattctgagacttggctgaagttgctcgtaatgttaggggcagccagagagaaaggctgggttacccacaaagggaagcccatcagactaacagtggatcactctgcagaaaccctacaagctagaagagagtgggtgccaatattcaacactcttcaataagggaattttcaacccagaatttcatatccagccaaactaagtttcataagcaaaggagaaataaaatcctttacagacaagcaaatgctgagtgattttgtcaccaccaggcctggcttacaagagctcctgaaggaatcactaaacatggaaaggaaaaaccggtaccagccactgagagaaacataccaaattgtaaagaccatcgaccctatgaagaaactgcctcaactaacaggcaaaataactaaccaacatcataattacaggatcacattcacacatgacaatattaactttaaatgtaaatgggctaaatgccccaattaaaagacacagactggcaaattggataaagagtcaggaccatcagtgtggtgtattcaggagacccatctcacatgcaaacacacacataggctcaaagcaaagggatggcggaatattttccaagcaaatggaaagcaaaaaaataaaaaattaaaaaaaataaaaaaaaaaacaggggttacaatcctagtctctgataaaacagactttaaaccaacaaagatcaagaaagacaaagaagggtattacattacataatggtaaagggagcaacgcaacaagaagaactaactattctaaatatatatgcacccaatacaggagcacccagattcgtaaagcaagttcctagagacctacaaagagacttacactcctacacagtaatagtgagagacttttatactccactgtcaatattagattaacgagacagaaaattaccctgatctttaacattccaggcaagtatgttttcagtcatacatagtacgtgaatctgttatattttaaatccaagcttttggaggacaaatgatttcacagttatacaactcagcctctcccagactcaagtctctcacttgatgcagtattcccaccccatcttcaataaaagaagaaagcatgaaacatcgcattgatatagggaaagtatatctgagttttctatatagcatataaagaagtaaaataactctgtgatttgtgatgagatagatttagctgcaacaatgaggtctggatattaatattggattaacttcctttgagattgcaacttccatgtggcattcagcactttccttgttttctcatatgtaggccgagaataaaattatcctgtttctatttcccaacatgaaaggtcttttaactgtttgaagacatatgtttcatgtgaaaccaaggaattgctactgcaattttgtaagacagaagttagcaaacttattctgtaaggaacaagatagtaaatattataggctttgcgggccatatggtctatctcacaactattaaactctgccatttttttttttttttgcaaaagcaaccatagacaatatgtaaatgaatgagtgtgattatattccaataaaactttatttttaaactacaagactagttcttaaaataaaatttaacaaagaactattatatgatccaataattccacttctgggtatatacccaaaataattgaaaacaggtattcacacagatatttgtacacccaagttcatagcagcatattttactgtagagaaaaggtagaaacaaatgtacactgtgtacactgaccaagaatggagaaacaaaacgtggtgtatccatacagcagaacagtattctgctttaaaaaggaatgaaattctgtcacatcctaaaatagggatgaactttggagatattccacctagagtagttaaattcttagacaaatagttgcatggttgccagggaccagggaggggtaggggaaatgagcagttcttgtgtcattggtatagagtttcagtttagaaagatgaagagttttggagatagatggtggtgatgtttacatatccatgtgaatgtatctaatgccactgaactgtatacacttacaatggttgaaatattttgtatattttcccacagttaaaaaagacaagcccatgtgcccaaattgctgatataaatctgtattcctattagtgagcagtaatgagccatgtttagtgcagctgatatggttaagatggaacaattgcatgtaatgcaatggtgggtaacatctaataaaaattggtactcaccaatttccatttccattgtggatataaacacccttcacattatgaatcatgttatttgttatttgtgtacttacttattaaatcacttttctccatctctctcacctctatgactctgtacatgtacaaacaacatacacactgtgaacttctttagaatgacagttacattttcgttacttgattcattgtttggccaagtagatacccagtaagcataactagcaagtgaataatgtatatgtgatcattttccttttcaaaaaccacttcttatctctaccacaccaccacacattattatatgctacacttcttatataaaacaaaaaagaataggccaggtgtggtggctctcgcctgtaatcccagcaatttgagaggccgaggtgggcagatcacttgaggccaggagttagagtccagcccagccaacatggtgaaaccccatctctgctaaaaatacaaaaattggccaggcgtgttggcgcatgcttgtaatcccagctacttgggaggctgaggcaggagaatcactggaacccaggaggcggaggttgcagtgagctaagatcatgccactgccctccagcctgggcaacagagcaagactctgtctcaaaaacaaacaaagaataaataagctttaataaactcttttgcagaagagttttcatttttaaacatagaggaaaaagaagatgaggatgaacgatagtgatgcccagaagagaaaattgtgtaagacaaaatcaattgaccaggcgtggtggctcacgcctgtaatcgcagcactttgggaggctgagacgggcagattatgaggtcaggagttcgaaaacagcctagccaatatggtgaaaccctgtctctactaaaaatacaaaaattagccgggcttggtggtgcacgcctatagtcccagctacttgggaggctgaggcagaagaatctcctgaacccagcaggcggaggttgcagtgagccaagatcacgccactgcactccagcctgggtgacagagcgagactacatctcaaaaaaaaaaaaaaaagattaaatcaattttagattgatatagagataaataattccctaagtacaattaaagcaaggatcagaccctgatgagtaaggatgatctaacaaagggctgacaatataaagtgaatgcgattgtcaccaaataaacatctcccaagagctttgggacaatcttcagctaagcatattctgcactttacatcgttctgccatatgccctatgtagcttttcatcctccagaaatttgaatagcacacagtattttttggcaccgagtaattgtggaacttaaacttcctacaaagagagaagctgtttcagtcagctaagtgaccagttagtaagcaacttctattctcttagtgtcgatagggttaaagacagtcataagctccccaaacccttggccgcctcaattttttcatttaaatacttatcttcttatcttcatctattttttagagtcacacataaactctgtctatgaggttcttaaagacctggacaatatatttaatctctgtatccttaaatctcaccatgatatctcaaagatggtagataaaactgttttccctcacttctctgactccataccaatacttaatcgatcgggaaagttttataaaccatttaccgttgaatataaatatatatacacacacaaacatatatatatttatatatatttatgtatatatatatttatatatctatatatatttatgtatatatttatatatatttatatatatttttatatatttatatatttatatatatttatatatttatatatatttatatatatttatatacttatatatatttatatatatatttatatatatttatatatatttatatatatttatatatttatatatatttatatatatatttatatatttatatatatttatatatttatatatatttatatatatatttatatatttatatatatatatttatatatttgtatttatatatatttatatatacacatatttatatatttatttatatatgtttatatatatatatatatggcactatatatcagtgagcaaaggcatcataatctttatttttatttctgtattcatttattcaacatatagtaattctgatcctgtctcaaaaactctacagaaattaacaaagaacacattgtttctgcctttttggagctgaatgtttagtgggggaaaatgtattttaaggcaataatcatatacatgagtgtatatttacaagccgcagtaggtgctatgaatgaaaagtataaggagctatgagatattctaacaaaaagaaatgctgcagtctagagactgagagtaattatctgtgaggaaaagtattgaagcagagacctgcaactcagtaaagagtgtagggagtcacatgaacaaagtcttgagatgttggtagagatcttggaatgttcgaaattctaaaagaaagcccttgtgtatggggtatggtgagagagggagagcgtggcaagttttacgttgtacaagtcattgtaggccacaaaaataagtatagattttatctaagtgcaacggaaaaccattacaagtttattttttgattcttaaattttgttttacttatttatttatttcaagacacaatctcactctgttgcccaggctggagtgcagtgacatgatcacggctcactgcagccttgaactccttgggctcaagcaatcctcccatatcaccctcctacctcagcttcctgggtagctgggactactacaggcatttgccactatgcctggctaactttaaacaattattttgaagagacagggtcttgttacgtttctaagtttctaaggctgatcttggattactgggcccaagcaatcctcccgcctcatcctcttaaaatggtgggattacagatatgagccacctcacccagcaaggtagtgacataatcattgtttttgctgaaaacaatgtactttagggaacctccctgaaaacagaatggccacttagaataccaaagcatagaccaagccttgagatggcaatggaagtggaaataaacatgtctttgatacttatgttaatggagctattagtagcaacttttgacagatttgaaagtggagttgaaagacagtgaagtgtcagggatgatccctgagcatattagataatattgagctggagaacagaaaagaaggggcagatttggaggtggagacctttctagatttatattcaatttgagatacatctgaaacatctacatgaaacgtggatgaaatatctgtgaccaagatacatacgtgggatacctaggcatgtaaataatatttaaagttatgtgagtgggtgcaataacctaaagagagactgtaggtagaagattgatcaggacaaatctttgaggaacttttttttttaattattattatactttacgttctgggatacaggtgcagaacgtgcaggtttgttacataggtatacacgtgctatggtggtttgctgcacccatcaacccgtcatctacattaggtatttctcctaatgctatccctaccctagccccccacccccaacaggcaccagtgtgtgttgttcccctccctgtgtccatgtgttctcactgttccactcccacttacgagtgagtccatgcagtgtttcattttctgttcctgtgttagtttgctaagaatgatggtttccagcttcatccatgtccctgcaaaggacatgaagtcatcctgttttatgaggtacttttaatgcatttagtgactgggtaaggaataaccctgaaaaggagcacaaaaaccatcgaggtatgaagaaagccaggagatgtagtttcacaaagcagccagtggacagtaatggacaccagcataagcttaagacagcagtgatagtgttcatcagtgctgaaaactcattggaagtggctgaccatatgttgattgcgaatgcaatgccttctcccatctcctattgcttttcactgtttccgtcatgtccagagtgaaaacactggggaggcagaactgtgtaccaagaaaaatgttttgtgtcagaggaaacaagagctcattaatttccttttgacccgcatggataggaatacgataagcaggagaaaaataaaacctgctaaactaggcaaataaagcttaatagaaaagagagaaaatattgcttacaaagggaagaagacatttgccacaatattagctaaaaagagagtgaggaaaatccacatttaccatttttattatgtgtttccaaagtcgacattaagtgaatattatcactttgaagacagagaatagattgtaagcagaagaggaagtgggattttttaaatggcatatatttaaatgttgaaaaacccatttccaatactcccactgagatatatgcaataaaaacactccgcaatcagtaatatacatgtgaagctcctaaaaatcctccattgagaagattctataaaactataaagtattattatttctgctatcagaaaataaacacatactttctaagaacaagatgaagaccttaattcatcttcccaggaatatacttgtgtacttaatggttcaaggcgtttgtgatgcaaaaaaagtgggacattatgtacaaaatagttttaatcagaaaatgaaggaagtttggtatggtatggttctagggttgcaagttttcctgcaaaaagggagtacttatggctaggtgatgcagccaaggaagcatctctgaggacaggttatcctggctcctattccaaaatatttaggtctccttgagtgttcgatccttgaaccaaggacaagaatagaaagaaataaaagccacttgtataaaggttgccttcattttgtgtcgaatattgacaggagaaagccagatttgtagcttttccagggataagtgagtctcagacacagttaagagcttggctttggaattagattgacctgagtttgaatcgtggctccatcaatctctgattgtgtgaatttttggcaagttttagctgaacctcaattttctcataagtaaaataggcataatacagctatgattctgacccttgccattagcactctgagctacttgtcagtgtatcctggtctcttcctcaagcacttttccactttgttatttcaagattctttgaaattatgaacagtagctcttgatcaccaaacaaatgggagaccatagattcaaaggaacattttagtaggatatttgataagctttgtatttttttgtgctttgaaaattagagtagatttagatttaaggaactataaagctatatgtttacaaaactttattcagttgggcagttctgactcagtaactgaaataaaattgatgaaaacaaaacatatgttttactgttgtgttcacatttaaagattatttaatgcataaccaaaataggttcagcaaatgtttatacatacatgtacttagatatttgtaattcttatggtagagcatgggaatgaatgagaattctcctaggctggaataaaactaatgtctaactaagaattggcctttcacttcacgaatatatatcattatatataaaagattcatcctttgttaacttatttgtttagcttagtactttctaagtacttttctatcctgtcttggtccctatataagaatgatactattataaaaatgaacatcctattatttcataatgattagcatatcagcatatttaagagcaatgcctatatctttaccttcattattattttcatgtttaaaatcctgataattctagaaaaacaaggttgtaattatccattcataataaaagtcacaccaagttattcttgataattaacttggcatagtggagtgcactgagcaattaataattaattacgtggttactagctcaaattttattgagaaccaaggagttaaaattaatagtattgtgtttgcaatgagttaattactttgtttctttgtttttttttttggaatagtgccataattagtatcctaatagaaacagaatataaagtgggtttctgagtgcttgcttgtcgaggtgtgtaacaacatatattttaattataatttgagtcactaattgttgtcaaatacaattttaatttcttagttcagagattaaaagatatgtaaacagctccaaaaaagaatatgataagatggtttatacaagtaaataaataactatatgacttcagaagttttatttaacaacagttgtataagtgttttaactaatgttaacaatgccttttttgtaaatctcctctaccacaaatatgagataaatttaagaacggcattttcattaaatattgattattaaaattcatatataagtattggctgtacctgagcatttacagtgaaaccatgaaggactggcaggtttggggctgtttgataatatccttccttaatctttcttcgtagcatcattgtttaattttggctgaccacaatcacttatgaaaagaaacagctcaaataattagtataacctctttctcttcataaaaccttcaaatcaatgtggtcataattatgaaagtgtaagattataaaatcttctcatttaaatatacatcttcatattagcagacttggctaatttcttcatttatccttgacatccacacttaaactctgtcaaactggtcattcatagactcattattcattcaacaaagattagtgtgaccctactatgattctgagggctagaaatataaaactgaataacatataaaccctgatttctgtatttatatatacagaaaggaattatgaactcacagttttaatgcacagtgacgagtcctcagttcatgtctgccttgggagctaggcatataccaaagcaggactgtctaacacagtttgggggtctcagtctggaaggatccgggtgagatgatccttgaattgagttctaaaaaatgaggagaaattatccagataatggaaagtttaggagaaattaaccagataatggaaagtttaggaaagaaacactatttatatgtcaaggacaaagtttgaccaaatgtgtctctgaatctaactggctttatgtaagataaaattaaaaaataattgtcactaaggtttttcacatctgcagcaactaccatcatatctggctcaatatttaaaagaaatacttaacgatttttggcatttattgctactataatagattgtgctatttaaagagaaattctagatacatgccaaagtattttcaggtgaagtaatgtgattcgtgggttttgttttgacaaacttccaaggaaattatttttaatataaagagcaatggaggaagattaaacaagattcgcaaatgttgataattgctcaaggtggtgacaggtgcatgggggtccataatatactgttctctttacttatatatgtctttgaagattttcatgatgtaaaattttaaaatcagaattacagtaatacctctttctttgacaatcgttttcaaacttggttcaacaactgaatttaaattacctacatggctataaaaataaattagatatcctggttatttggtctggggtgggtcctggccatatctgtagggtgtgtgggtgtgtgtgcatttagcttcacatttgactctgaagtacgtggaaaaccaattctgggctctacatatgcaattccaatgcctgacattaggtggtgctggttgtgagccatgatttcaggtttgacttgtagagttaacagaagtgatatcaccaccgatcccacagaaatacaaactaccgtcagagaatactacaaacacctctacacaaataaactagaaaatctagaagaaatggatacattcctcgacacatacactctcccaagactaaaccaggaagaagttgaatctctgaatagaccaataacaggagctgaaattgtggcaataatcaatagcttaccaaccaaaaagagtccaggaccagatggattcacagccgaattctaccagaggtacaaggaggaactggtaccattccttctgaaactattccaatcaatagaaaaagagggaatcctccctaactcattttatgaggccagcatcattctgataccaaagccgggcagagacacaaccaaaaaagagaattttagaccaatatccttgatgaacattgatgcaaaaatcctcaataaaatactggcataccgaatccagcagcacatcaaaaagcttatccaccatgatcaagtgggcttcatccttgggatgcaaggctggttcaatatacgcaaatcaataaatgtaatccagcatataaacagagccaaagacaaaaaccacatgattatctcaatagatgcagaaaaagcctttgacaaaattcaacaacccttcatgctaaaaactctcaataaattaggtattgatgggacatatctcaaaataataagagctatctatgacaaacccacagccaatatcatactgaatgggcaaaaactggaagcattccctttgaaaactggcacaagacagggatgccctctctcaccgctcctattcaacatagtgttggaagttctggccagggcaatcaggcaggagaaggaaataaaaggtattcagttaggaaaagaggaagtcaaattgtccctgtttgcagacgacatgattgtttatctagaaaaccccatcgtctcagcccaaaatctccttaagctgataagcaacttcagcaaagtctcaggatacaaaatcaatgtacagaaatcacaagcattcttatacaccaacaacagacaaacagagagccaaatcatgagtgaactcccattcacaattgcttcaaagagaataaaatacctaggaatccaacttacaagggatgtgaaggacctcttcaaggagaactacaaaccactgctcaaggaaataaaagaggatacaaacaaatggaagaacattccatgctcatgggtaggaagaatcaatatcgtgaaaatggccatactgcccaaggtgatttacagattcaatgccatccccatcaagctaccaatgcctttcttcacagaattggaaaaaactactttaaagttcatatggaaccaaaaaagagcccgcatcgccaagtcaatcctaagccaaaagaacaaagctggaggcatcacactagctgacttcaaactatactacaaggctacagtaaccaaaacagcatggtactggtaccaaaacagagatatagatcaatggaacagaacagagccctcagaaataacgccacatacctacaactatctgatctttgacaaacctgaggaaaacaagcaatggggaaaggattccctatttaataaatggtgctgggaagactggctagccatatgtagaaagctgaaactggatcccttccttacaccttatacaaaaatcaattcaagatggattaaagatttaaacattagacctaaaaccataaaaaccctagaagaaaacctaggcattaccattcaggacataggcatgggcaaggacttcatgtccaaaacaccaaaagcaatggcaacaaaagccaaaattgacaaatgggatctaattaaactaaagagcttctgcacagcaaaagaaactaccatcagagtgaacagggaacctacaacatgggagaaaattttcgcaacctactcatctgacaaagggctaatatccagaatctacaatgaactcaaacaaatttacaagaaaaaaacaaacaaccccatcaaaaagtgagcgaaggacatgaacagacacttctcaaaagaagacatttatgcagccaaaaaacacatgaaaaaatcctcaccatcactggccatcagagtaatgcaaatcaaaaccactatgagatatcatctcacaccagttagaatggcaatcattcaaaagtcaggaaacaacaggtgctggagaggatgtggagaaataggaacacttttacactgttggtgggactgtaaactagttcaaccattgtggaagtcagtgtggcgattcctcagggatctagaactagaaataccatttgacccagccatcccattactgggtatatacccaaaggactataaatcatgctgctataaagacacatgcacacgtatgtttattgcagcactattcacaataacaaagacttggaaccaacccaaatgtccaacaatgatagactggattaagaaaatgtggcacatatacaccatggaatactatgcagccagaaaaaatgatgagttcatgtcctttgtagggacatggatgaaactggaaaccgtcattctcagtaaactatcgcaagaacaaaaaaccaaacactgcatattctcactcataggtggggtgggaattgaacaatgagatcacatggacacaggaaggggaatatcacactctggggactgtggtggggtggggggaggggggagggatagcattgggagatatacctaatgctagatgacgagttagtgggtgcagcgcaccagcatggcacatgtatacatatgtaactaacctacacaatgtgcacatgtaccctaaaacttaaagtataataaaaaaaaaaaagttcgttcctcttgttagaattttcatacaaatgcaagactccttattttcaaagagaaaacaaaattttatataaactaatacctgagaagaataggaaaaattaatgatgtatgggataggtactgataagaacctcttcttttgtgtacattgtgataaactaatgtttaacttgagtcgatgtgctggaaatacttgttaaattttcaagaattttgagatctgttaaacacaaccattatcaaaaattaaattatggtaacttacattaaatgaaatatattgttcacaaatgtactagatgcacaaaagtcatcactacctaattcttttattatatttcactattatctacgggtttgttacctgtataatggaatgactgtataatggtgtagtgctaacttcatgtttggtgacattataatgatagcttaaaattaaacatactgggaatattcaaatatgtccttcctctcaggggatctgattgttagacatttaccagcatagcactgtcttaattaacatcatataattgtcttttatccttaagatgttgagccagtaaatatcacaggagagtttgttccttaggttttaatacttgctttaccagtttactgtagcatcatgtgaaaccagcttctagaccagctgtctttaattggtatgtacccaagctaatccttgtcaggctatcatcaacccaagcacttttgaagttatttttattattacgctacagaaagattttatggcctttttgctcttttctttaccctagccctaggatcatataatttcatctcctatttattcctatttatttccttatctaaaatcttacttaactagcttgcttgcctgcctgtctgcctgtctgcctgcttgcttggtttttctttttttctttcttttctttacttctgctttcctttcctttcttttgtttcttccttccttccttccttcttcctttcctttccttctgttccttttccttttccttttcctttgcgttcctttgctttccttgctttcttcgcttgctttcttttcagtaccacaaaaaaactaacaataacaaaaatattgctacaaaaattgtgacctcccaattctatcctcatttcacggacccataaaatgattatatatctatgccaatgcgttctaactacatgatattattattgatgataagagaatccaaccctcaagaaatgaagtattataatgttttagaacacacagaagcatttttaaccaaaatgttccatgtgattttatagggtgcatgttttaccttttcttatttggaaaagtagcaaaagtattaacaaataaaataagttacatactctttgtatataaatctttcgtgtacataataatgccatttcccttctagtgcttccattattgaaaaaaaatagacatatagcaacgtgctagacattgaagttaactgttaaaaagtcatcagagggtaatgttaaaggtggtatttcaggtaataaagcatatgcagaatgattctattggctttatttccaacatgagtgttattagtaccaaggacactgaagtttaaaggaggggagtgatgagactgatcattactttgtcttctgtaacaggacttaggtggcccagagtgatccttgttggttgattggttagttgaacttctatttttgttactaggcctgcagatctgtggaatctccagagtgctgtgtaatgttacataggccacacaccagacactgttccctgaaggactgaaggtggaattggaacaatatgtagacagttcttgttgcagttaccaaggaaatttggttaggattcaggcctccatgtcagaaaaggaagtctattttatgtgctagaaaaataaccctaatcatcttatcttgggtctctctggggagcatgatgatctacctggtcttgtaaactgtatagaaccggctgggttgagacacatatgtctcataacagagcttccacttaaggctataaaatagtggtccctctattgggtatatgccttatggaaaaatatacgttatgctggtacctattataaaaaccaatgcaaaatgattagagatttctaatccaagtgttatcctcatctgctcccaaaatacagcaatgaaaaaatagaaaataaaaaaggatatatttacagaactgtatttacagaaatatatgttgatgacaagataatcaaatacatatcaaatcatgatgtgtatttacagaaatatatttacagaaatgtaaagcagagaatggggcggaagtccctgacagacttgacactgaaccacaaaacaacagtggaagccaggaatttggatgctgcgggatagttgggattaaaattgcttcaagcaaggtgtggaactggagacaaactcagtattcaaaaccagaggctgggctgtggtgcttgcattcgtgaaagaaaacctggggaaaaagtgcttcttcaggctgtagcctgacgctatggcttgcctaaacttatgggcctatgtaggtgtaagaataaagacatagccttgctgctgggaactgtgttgcatctgttctcttgcttgatgaatggattgaaattatccccagtaacattgcagtgcaagaactttaaaccttaaaggggtggctggagaccacgggacgcgatgcacatgcaactactaaatgctagatgaggatacctgaggagagagaacaagacacaaacgtgaacatggacctccaatagaaatgacaatcgaaaacatacatttatcttctctctctcccaaattgttcaaagattacgctaagggaataaaaacaatacagtcataaaatgacaaataaaatggaagaagagacatctgcacagacatatcaagtcaatgagatgaaaattaggacaagtaagccaatttgtttttcaggatcccagaaaaacttgtggattgaagacgctaggtgttttagaaggccatatattcccgagaggggctggaaataaaggggttgttttgaatcccttaaaaggggcaattacatttcatgtccccagctcagggtagttaattagacactactcctctctcatcccagcagacgtgagtgagtggtttgctttctggtgaggctgaaacaacttttggcatttggacaacaggattagttgatggaagagagagccaccatactgaaaatacaggattaagttaaagtcaacatatttaatggtgagaccagcagtccctcttcaccttcttggctcttaagtttctatcctctgggcagtagattataaatttattctcctgagagcctacctgcaatacgaaaactatttttagtcaagttttattgctataacaaaataccatagactggatgccttataaacaacagacctttatttctcaccgttctggaggctgggaagttcaagatcaaggcactggcaggtttggtgtctggtgaaagctcatttcctgtcttctcactgtaacctcacaaggcagcaggtccaagggaactgtcttgggcctcttttgtaagggtactattctcattctggatggctttggccttatgacctaattaccttccaaaggccccacttcctaatgtcatcaccttgagggtgaggatttcaacgtataaattttgcaagaacacactcagatcatagtaacctacaattaatgatatgtaatgatccaccagtgaaatagccagatctgtgcctaatgaccatatattgaagcccaccaagtataagccctacatacgcacaaggaatttccaaaagcatttaatgcctcagttttaagagacaatcaaggatttccagatatttgaacatgtctcaaagatggaagacagaaaccaacataaaaacaaaaagcagaaatattgggaaaaaaacaatagccacataaatgaaacagaaatctctgcagaaagagagacaaggcatagaccttaagaaaactttttaaagatagctataaaattattatctcacagtgagactagtcactgtattcataagaaagaacaagagactatagaaggtggtatttccgagaaagataagggttatttaaattaatagtatagcaggttaagtttttaaattcttaattgtataaatttatgggttaccagtgtaattttgttatatgaatatattttatagtggtgaaggcagagcttttagtatatccaccactggaataacatacatggtatgcatagcagttttagagcaatgaaactactctgtgtgatactataatggtggatacctttcattatatatttgtccaaacccatagaagatacaacatcacaagcaaactctaatgtaaactatggacttcgagtgttaatgatatatcaatgtatgtaagtcagttataacaaatgtaccactctggtgtgggatgttgatagcggggtaggctgtgtgtaatgaggaagggggccagagagtatacgggaaatctctgtactttcccctcgattttgctataaatgtaaaattgctttaaaaaatcaagtctattaaaaatgaagagcagaaataaaagttcaaaagtagaagataaatttgaagaaatatctcataaagcagtataaatagccaaaagcatggaaaatgggagagtataagaatcttagaagatcattctaggtaagtgtttcacaaatagaggtgattttgtcctgcagaggacgtttgacaatgtacggagacctttttcgttgtcacaaataaggaaaggatgtactactggcctcttgtgaagagtgacgcaagaggaatgcaccatgcagccatccacaaccaagaattactcatttcaaagtgtcaatagtgtttatgtttagaaaccttgttctatgtaatccaacattcaaataatagatgttaaaaataaaacagaagagaggcaactgtggagagaaaattatcaaagaagtgacaacatcagttttcttagaactgaagaaaatgagtgtccaggtttaaagggcttactaaatgcccagcacagcaaatgagctaaaaatctacaccaaggctcatcatcataaatttttacaaaaacaaggacaaagagaagttcacagatcagaaatcagaatggctttggacttttcagcaatagccatggaaaatagcagaaaggaacacttcctttaaacttctaggaataattaactttggctttgatttcatatcctatatgaaattatgttcacaaattctgtgatgctcttctattcaagagttacagctaaatgtccctgtcattgagtgtggactagattcagtgactcttttgtgatgatatgtcatttccaagtgtaggttgtagaaagactgtggtttatgtcttgtgttctccatccacgcctatctctctctgtgtctctctttctctctctctctctctctctctctctctcatgcattgcttcttctgtgggaacacatgtcatgagcagccctatggagatgcacgtatgctgagaaactaaggcctcctgcaaagagccacaagaatgagcttagaagtgcatcatttaacaccagacaaatctcgagaggctgcaagcatagacaacagcttaactacaacctcataaaataagctatgccagtcccaccctgctaagccactctcagattcttgaccttcagaaactgccaaataataaacatttttgtttttaagctgctaaattttggaatgacttgttattcaacaatatataaattgtacaccctgataaactataaattgtgcggagaaaataattttcagagatagccttatgtactcccctaaaccttttttccccagaaatctattttcaaaaatatactctaccaagtgaagaaagaaaccaagaaagacaaagaatgtttagttgtgattggagatcagaaggagagtgttttaggcatgattcgccttgttatgctgcaataataagcaattccaaaatattagtggctagaaacacaaaggttgattttgtatctttgcaacatatccaacacaagtcagtcaagggttctgatcattgtagtcactcaggaatctaagctgattcagtctctagtattctatcattctaccgtaacaataagaagctttagcgttcaccatgtcagtcaaaaatgcgtggaaaattttaaactgactcttacatgcctctatgtaggagtgatatatgtcattttcatttcacttcatcatccaaaggaagtcacgtggtcatgcctaactctgaggggacaggggattataatcactaatatttttaagagaggtaagagaattaggaaaatattggagcattagtattacctgcaaagcctaggatccggaaaacagagaacccaacgtgggaggaagatgcaaagtggtgccagaaagatggtggaggagatcctgtaacaacagctgtataacagttgtagagagaaacctgtacagattggagaagaaaatagtgctccaggaattttgttaccaagaaaaaaaaaatctaatgtattcgaatgtattgagaggtggtattcttattgtgtaagagtataatatatgacatgtatgacagacagaagtaccatttaaaattttattaaacataagaattagatccctatctcacactgtacataaacataaaaatggtaaattgatggattgcctaaacatgaaaggcaaagcattaaaatatataaaaatattttggggcatgtagggcaaaagaggtgtcccttaagcaacagcacaaagcaaaaattgtaaagaaaaagacatatatttgatcattttaattaaaaacctgtacaatgcaaagacttcataaacaaagaaaagacataggctcagatagtatatttgcaatactaaaacaataaaggatttatgtcataatttaagaaaaatatttacctatcaatagaacaaaataaaaataacctaacaggaaaatatttttaaagtttaaaaaataatagacagttcacagaacatctgtatgtcaaatacacttatgaatagatgctaactctcatttattattggaaaaattacttcatattagtcggttttcatgctgctgataaagacatacatgagactgggtcatttatacaggaaaaaggatttaatggacttacagttccacacagctggggaggcctcacaatcttggcagaaggcaaggaggagcaagtcacatcttacatgaatggcagaaggcaaagaaagtcccctttataaaaccatcagatctcatgagactaatttactatcacgagaacagcatgggaaggacctgcccccatgattcaattacctcccacgaggtccttcccacaacatgtaggaattcaagatgagatttgggtggggacactgccaaaccatatcgtactaagtgagataacgtactcccatcggactggaacaagtaaaaaataaaataagattgtgaaaggtcacaaactctcattcttgtagaaatttaagttggtacaaccaatttagagtgtaatttagcaataatctagttaaactgaggatggcatgtcctaccaaacagcattccagttaatcacattgaagatagcatgattgttctcaggcttccatattttctgttgaacggtaagttgtcagtctaattggcattcctttaaaatagacttgtttcctcttgatgattttcacattgtaattttgtctgattttcagcacttcaccggtctttaaatgattatgtaagattttcattgctgaggaggaaatcctatcacctcaaatactatcttattagttatattttcattttattttaccatgattttaaatgaattccttaaaaaattaggttagagaactaataaatgataaagagaaaaattattcttcatcctgatagctgttatgtgagggtggaatggtatggctggtttttttcactgtcattttgtaacttggaaattcttattttttaatacaatgacaatattttcatagttaaaaaacactaaaactaaaacaatagtctgttaatgacaaatttaagggcgatttcattaagttaaaaatccatgttaaggcattataagatgaataaatactccaaatgaaaacaaagtgaaggccacttttatttaccttttgtacatgatacttatttttcaacagttgtcatgttagaaaaagttgaaaaaataaaacaagatacacccccttttggcctctaaccttccaaaattgtaatgggtagacttcaaattaaatatctaattcgactcctttccacttctaccctcatagcattagagacatttggaaaaatgaaaaaaatatagtattttatggcagggtacctcaaccccagagccacagacccgtaccaatccgttgcctgttagggacccgattcgcaaagcagtaggtgagcagcagcgggctagggaaggaagcttcatctgtatttacagctgctcctcatcactccatttctgcctgagctccacctcctgtcagatcagcagccacattaaattcccataggagcacaaaccctattgtgaactactcatgcaagggatctaggttgcatgctccttatgagaatctaatgctgcatgatctgtcactgtctcccatcaccccccagatgggaccatctagctgcaggaaaggaagctcaaggctcccactgaatctacattatggtgagttgtataattatttcattatatattataatgtgataataatataaataatgtgtgcaataactgtaatgcacttgaatcatatggaaaccatcctccaacccggtccacggaaaaattgtcttccacaaaatcagttcctggtgccaaaagggtcagggaccactgttttatgggataagtgaaagctggatttgaatccaactctaccttttacttcccatgtgaacattaaaagatgacttaatgtctctgaatctttttttccttctaagtaataactaccttgcagagttattacttgaattggccataaggtaaagaggacaccaaatacagtaaataataacataataataaagaaaccttatgaattctattcagtgatatccatattgaggtatttaaggtgaatgatactgatgtcagcagtttacctggatatgcatcaaaaatatgattgattgatggatggatcggaggaaggaaaagatatgtgatcaaaacgagtatagtaaaatgttcatggtggaatctagatatatagatatcacttgtaatttttaaaaatgttattgcatttttgaaatttgttatgttaaaatattgggtgaaaattctgatgccctggccatgtcccaaatcagttgaatcagatctctggtgtattttttttttaagatccttggatgactccattgtacagcaagtttgcaaaccactattctaacttctcaccacccccttctttatagcttacaaaattatatttttaaatgtcaaatgtcacaatttcactttccttcttcaagaactgattagacttctagcttctcctatgctctcatcttgcataacgttcatttgcacgtggttaaaactgataggcaataaataataacccatctgtcttttcctgacccaacataactaaaaccttcctttcaaggcgaaaatgaactataatctcacagacaagagtagctatagacaactaattctttctggtctctcgtggtcatgggactattcaccactgccgtccctgctgtctatttggtggaccagccagttttactgtgacccataccatggctcttgagaagcatgaagctgccgaaatcgcagttgtagggttaatggaaaacatggtgaagtatagcttacatatatatacaattttggcacaaaatgaagcctaagaaattgtaccgggctgggtgtggtgactcatgcctgtaatcccagcactttgagagaccaaggtgggcggatcacctgaggtcgggagttcgagaccagactgagcaacatggagaaaccctctctacttaaaatacaaaattagccaggcatggtggcgcatgcctgtaaccccagctactcaggaggctaaggcaagagaatctcttccaccctggaggcataggttgtggtgagagaagatcacaccattgcactccagctggggcaacaagagcgaagctccgtctcaataaataaataaataaataaataaataaataaataaataaataaataaaagaaaaagaaattgtaccaggaagtggattgggaatgctctatatattctccccctccaagaagtttttttaatttattgtattgtgaaagatctgcagctatttattttgtgtggtactcttttgcaataaactacttctgcataaatgaactcaaaaactttgatattcatgaaccttcataatgttgatctagtacatcttgcccaactagcccttgggccattccttccatgccactggttgaaaaatatgctccccaccccagtaacatcagcatcagacctctgcaaccagaaagattccataggtaatgaaatccaaatgctggcatttggaagtcaaaccagtgtattttgaaatggaaaggcaaggggaagtgcatggagcaagtacagcatgtgctacaacttcagttcataccctccttaaaatactgtgcaactaaactgtcaattgcccattgatagagatagtatctttttcagctttacaccttccgaattcaacacactgctagcctcaggactaagcgctcaataaatgtttatcaaaagattgagtaaatgaatcagtggtgaaataaaatgtacaaacacatacgcttcatacacgtttaggaagcatttctagtgagctttgtggatattttatttcttaaaggttctttttctttccatgttcatgttattctttattttttaaaatgttgcttctgcttatttctctttctacggcagctatatttacttgcctgagagcacagcatatactgatgttaatcaaactttagatgaaacacctaaaatgatagaaaagaatctgctctaattaaataataaagcaacccctacaggtttagacatgtgccttccggtgtgggaaagaaaaaatttaatgaatgtagtagttttatgccaagaacatttccctcgtgcacctgtgttttaataagatagaatataaaatagcaaaaggggcccgacttttgtgatgatatttactcataaggtagtaagtcagatgtgatgacattttctttgacttagagctgctatacttgggtcagatttcagttcagtaaatttgcagtgaagttgtctttctaacatggtgtcatcctggaactgccctgctcccacagttacatacaggctagggagtgggtaggagtgggggtgaaatcctcttaatgtttatggtgtcagtagattcaaactaaaattagccttacagccatactcctaataaggggcccctggcatatttaattgatttaacaaatttatcaaaaatagataaactgaaatctgccttgaaattaattactgtatctctatttttataagaaaatattttggacccgttccctctgccttatgggtgcaactcccggcagaataggtcatgtctcctgaaaatagttcttattttctttactacttatgacctcttatagcctagaagtttttccttgctatttctagttgaaatgctaatctggcataatttctagttgaaatgctaatctggcataatttcagaactaattttctgttaatgccacttggaacatctaaattcctcctttttcaataatactatatttgtgtgttgcaaacacacacaaatcatactatatttgtgtgtatatatagtaaattccaacttataaaagtaaaattggaatttttttctttctttggaaaattattttataattgagaattataaatgtcacttttttaaatgctgcaacctttgagattggtttcaataaagtaaaacttagtaaacattaagaaaaatgatagcttgatatgttcactaatatggtaaatgaaaacttttatgtgtgtataggctcttgttaattataactaccttcacaggaaaaacagtcttgtggaaggtaatggtgccagtgagagaaaatagagaaagtagaatagtagtaagagagaaaatagaatttcccgtttagaataaagctaagtaaaaagtgaattgtttcagttttatttatgtatttgtaagtgtggtctcatgccatatatattcaaagatagacagagatcttaatctttaattttttatggccaaagaaaatgagtcccatgtaaaagggacattttcgtaagctgatctcaagtggtgtattttgatttgccgcagcagcctatggaagaaatatcattttggctgcctaagaagaaaaatgtcatacctttctattttttattcatactccgcatatttggaattcgtattctcaccatacttttgggaagataacacgaaattgccttacttgcctcgaaatcaaaatctgccattcgttttaaaataaaatggctttttcatctcattttcctttagcagaaaaaagtaagttaaatttttttgtagctgtgttaagtgtactgttcctccctcgttgagaacgaaacaaagacatatgattccatttactgtaattgttttggtttgcccaattacaatagcagtaaaatcatttacacatagtaaaatgtttgagccttaaagggcaagaagactaaatttagctgaagatatacaactttcatgtgccaatgaggaaatgtataaaatcagttatacatattttcctcattcatagatattgaaaatattcatatatgtgtacatgtatttgataacttaatattttctaaataacagaaattatatactgtatatatatttggatattatgattattgttattgccaccattgagcacttactatgggctcagaaaacttcactgtattatttttaattcttataacaaccctgtgaaatatatattatgcctatttcacaaatgagaactctgaaatcaggaaattaaatcacttgctgaagtttacaaagcactgttaggcaataaaacagaatttcaaactcacgtttgcttgtcttcaaattttgtatgctgtacaacctgattgttttactacttgttcttaatttcaaaaaaaatcttcatactaaaagatgatactttgggagttctaaagaacatgtttttggccgggcgcggtggctcacgcctgtaatcccagcactttgggaggccgaggcagaaggatcacgaggtcaggagatcgagaccgtcctggccaacaaggtgaaaccccgtctctactaaaaaatacaaaaaattagccgggcgtggtggcgggcgcctgtagtcccagctactcgggaagctgaggcgggagaaaggcgtgaacctgggaggcagagcttgtagtgagccgagatcgcgccgctgcactccagcctggttgacagagcgagactccgtctcaaaaataacaaaacaaaacaaaacaaaacaaaaaaaaccatgtttcttttcagaaggtatactcatttgaagtggataccaattatttgtattaaaattacttatggataaatttgaatctgcaaaaattaagtgcaacattattttttggcacctgttataggaggtaaaaatggtgattcaatatagtttctacccttagggagcatttagtgtggtttagacgtaatgacactaatgtaaattagagtagaataaattctttaaagcaggacaaaaggagtgttaaagactacaaagtttcagttatggaagataaaattctggagatctattatacagcatagtgcctatagctaataatgctgtttcggacacttaaaatttcctaagaaatcttatgttgtgttcttaccaccagtaacaacaataataaaggggacaagaggaaattttgagtgatgacagatatgtttatagccttcatggtggcgatggttttgtgggtgtatacttattcccaaactctttgattttatatatatatatatatatatatatatatatatatatatatatatgatgaaactctttgagatatatatatatatatgtaaaatatgtacagctttttgtatgtcaatcatacttcattaaggtggttacaaaaaagaatcaagaaaaataatcaccctaataaaaagagtgttattaaagaggggagggattacttctaattggtagtatcagaaaggttctcatggaggaaggtatagaaaaatttaggacaatataagcaacgatactttaagaaaaggaataatataaacaaaaataaaccaaaagatgaagaaccaccaaggatgtttctgaaaaatcaagagaaattccattttgatttgagagtatgaggtacttgtcatgatatataatgagaagtgtctagaaatatgttattttgagcaaatgctgcttagaaaggaggttaggttatttattaatccattcctttgaaatataaatttcatgatcagaaacacgtgagtgtaactatccaataacaacatgatttatttccaagaggatagtatattataggagaagtaggattttttctctttcacaagctaatacagtgtttactgattcaaatgacacttaaaaaaaacaagaaacaaaaaacatacactataagctatccttattcagctatgttattgtcttgcattcctgattagaaacatacaagttagactcccaaagtctcagttttctcatttgcaaaatgaataaaatgatagtacctaccccaaggtgctgtggagtatatttaatcatgtacttaatctgaagttttaattagagtgcatagcatatatttgtggttgcttttgctcctatttctgggtaaaagttcctacacctattatatatgttttgtgtttgaatgaagagaaaggcatcattatttcaaatatcccctctagccaacaaatgaaagctaagacttggaagctaggatgtctaacaccatatcctcttcatgtggactatatagtagaggatatgtaaattaagactcaattaaatgctcacattttataaaggagacccttgaatatatcaaatcctcagagagtatgtcagtttaaacttattaagaaatttaaattatttaacttagcctgctgagtcagtttctgtagctgatttctccaaaaggtcttggtattaaaagtagcattacagatcactaatagcaaactatttctgctactttgggtatttttacagggtgctaattgtgccaaatcaagacattgaaattgcataattttaggttaatattagcataatcctacatattttttcagaagcagtgcaggaatagtacaccctgaatatttttccatcatgatggaattttcaaatatcacaacctttacattgtcagttgtctgctggaacattatattgtgtcaaagagatttataaaagagaagggcaaagaaaatttgcggagttctagacaatagtaatatcagggacacttttgctttctttgttattactaaggagttaaataatcagataccaagcataggtaaagaaatgaatctctaactatttgagtacttatcaatttatctcaaggatatttacggtgttttcccctaagccaaaatagagtgcttaattaaggtccccttagccccctaaaaatcactcaggccaagtttctgatatgtgtgtatacttatatacatattaaagtatatgtatttttgtgtgcactttcagatcaaaaagtcctcgtttatctaaagcaatttcagcttattgatgaggcttttctgttacagcgtcctcctccacagatctgcctgtctagagatttaagcccaataagagtccagcaaagtttaaacaacactttagaaatctaaagaattttaagatttattttaatagtcttagtgataacctgaattgtttgtgagttcttacaaataatgcaatcaacatttaagtaattttattatttttttgtttgtataaatttaaggtatacaagtacatttttgttacatggatatattgcagagtggcgaagtctggttttttgtgtacccatcatgcaaatgatgtaccttttctccattaagcaatttcctatccttcgcccccatcccaccctctcgcccttctgagtctccagtgtctattattccacactctgtgcgcatgtgtacacattatttagcttccacttgtaagtgagaacatgcaatatttgactttctgtttttgagttattccacttaagatgaccaccagttccatccatgttgctgcaaaagacatgatttcattctttactatggctttgtagtatttttcattgtgtatatgaaattgtttattccatacgcaatttgtgtgtgtgtacatatatatatatatatatatatatatatatatatatatatatatatatgcttagacttagaagctaggatagacacacaatggaatactacacaatggaatacattcattcacacacatataaataaaagaatatgtggagatatatctccacatattctttatccaatcatctgtttttaaataatgctattgacttctttagggtgaattttatcaatattgttttggtttaaaacactcaccttaaaagagtcacagtccctaaatgtgcatcctcatatttaaattaggtctcagtaaatttgtgcaaagtgtattctttttaggatggtgttgaacttgctaaattatttatctttaagaatcatcattttgtgtcttttattaatgaaaacaacaattatgtgattgctgatatatttggaaaatgatttctgatgtagattgatttttttattctaaattctgtgtcggtattaaaaatttatagattactaactgtattaatatcgataatactaaattttattgctatttataacttggagtgtactttcatcctcctgaaaaagctgaatgaggtaggcagtattattctgggtttatgtgtgagataactgagactcagaggtaaaatagtgtatccaagcattcatggctcttaaatggaagatataaggggtttgtgaaattactcatggacttttttattcattcattcagttattaaaatgtattcaacatttatcatgtaccaggaacagcgcttagtaccaggaattcaaaggtgcataaaacatcttccttattctaagaggtacatagtgtactggaacaaacagccttgtaaatacataattagaacatgaagtagtatgttaatagaggttttcacaaagctgtggaagcttgtcttatgaagtaactaattccaagggagagaagccttatggaatagtgacattttagatagggtgtcattctaaaatacagcaaaaggcccacagtaaaaaaggaattttggttgttatgaaaattttcagattttctatgttttcagtacagtatacatggtgggctatgtgaatgtttgtatagggaccaaagtaggaagtgaggttgtctgttagagagcgctgagaaaccgaaaatagggagagatgagttggaatatgctgaggaaaagttattaggagttttcaagaaaggccacgacagtggggctagagagaagaggctaaattaaagagtcatttctggtttagaattgataaaatatagagacaagcatgataagaaagaagtcgagaagtaaacgatggtctcaagatttctagcttggaaatcattgactaaaattaaaactaaggactggattaggccattcttgcattgctataaagaaatacctgagactgggtgtttataaagtaaagaggtttaattggctgacgattctgcaggctctacaggaagcatagcaacatctgtttctggggaggcctcagggagcttttactcatggtggaaggcagagcaggtgtaggcatttcacatggcgaaagcagagagagagagttggtggtgggggtgggtggctacctacttttaaacaaccagatcttggagaactcactcattttcatgaggacagtaccaagaggatggtattaaaccgtgagaaaccaccctgatgatccagtcacctctcaccaggccccacctccaacattggggattacaatttaatatgagatttgggtggggacacagatccaaatcatatcaaagacttgcatgggaaaataaggaattgttgacataacatctttgaggttcacatcaaatgttctgatgaggatagtccaagtagcagttggctatatacctcagataagggctgaaatttggagctatgtcataatcagcctagattaagagtcaataatctcctgcccatgggccaattacacccaccacttgtttttgtaaagtagtattgaatcccagccatatccatttgcttatgctccatgtataccttttttttgaacttcaaggcagagttgagtagttgtaacaaaaaccatacggcccacaaagcctgaaatatttgttctcaagatctttatctataaagtttgccaatacctgctgtagatgttagttgaagctttgaaagcaaatgaggtttcataaggcagtgtccatacaagacatttaacaagtttacctataaaaactagaattcctttgaggggaacacatcctagtctccattaagcacagtagaagagtcccctataatgggaaagaggtcactttaggtgttgatgttggtggtacaggtcaaagaaaatttatctttgctgtttattcagaatgcaataagtgaagttatgagaaataagggaaaaaatgtgtagaatttcaacagcgaagagaggggataaaggcatgagaatgagttcctaagctcaagtattataaacactgtgagaaacttaaaatcaaagtatgactccaaacgtatttgaagcctgagaacaaggctcacaacctagggaggattagggatcaataaaatagagtgttacaaagtataatgtcaatccagagttgtaaaaatatcagcattgaatatattgaaagcagtaaaactgaatgaggagactatcattttatatcactgtgtttatttctttgccttgttctataaatatttaaaattataaaatttttattaacagtgagagcagaactaccagagtgagcagatcaaaattgggacagatgcttttcactgcacacacttttatttttctgctgttcatgcattatcttgtacagtgcacatgttttacctaaaaaattaaaatggagtctcctgcttaggaaaaaagtatatattctgtttcaaactatatacaaaaataaaatcccaggtgactaaaaactgacatgagaaaaaaacaaattgataaagcttttacagtaaaatagaggagaatatgttaattaatatagggtaagaaaaaattgcttacacaaatgatgaagcactaatcatgaataaaaataataaagtggactaccttgtatattaataacatctatacatcaaaagacagcactgagagagtaaaaatgaaacccacagagtaggataaattatttggaatacacacataatggatgaaatgtgtgtattcataattataaagaattcctacaaatctttcagaaaagaacagataatccaatagaaaaatgggaaaagttcttgaaaagtgaaccatggcacaaaaagggcttgtggcctgctggcaatattctgtatcttgacctggatggcatttttaaggtgatcactttatagtaaataactaatgtgttttatgcatcatagtaacgttaagatttttgtcatctttacaaaataagaaatccaaacggccaataaatatataaagaatttctaagtcccattaatggtccaggccatgcaaattaaaactaaaatgaaatatcactgcttaccaaccagaatcattgaaatttataagtctgacaattccatgtggtggtgagaatatacagcaattagaaatttcacacaatgttacttggtctgtgaattgtaaatagaagtgtaaaattacactactgcttcttggagtgaaatccatttggcactatttagtaaattcaaagatctgcataacctatagcccaccaatttcacttctatatatacactctacagaaatgcatatgttcatattccaggagacatgtttgggaatgtcatagcagcatagtaatagccccaaaccaaaactacttcagtatttattaatagtaaaatttgctatagtttgaatgtgtctctttccaaattcaggtgtcgataatgtgctagtactaagaggtagggtgtttaagtggtgattaggccatgagggctccttctttgttaataaaaataagacccttataaacaaggcttcacgcagcattcagtcagcttgctctcttgcccttctaccttctgccttgtgaagatacagcaggaaggccctcaccagacaccaaatgccagagcctttatcttggacttcccagcctccagaactgtgagtgaatacattggtattatttgtaaattacccagtctcaggcattttgttataacagcacaaacagactaagacaatcatacagtgagaaattaatcaacaactaataagcaaagaggtagattaatcttgaaactatgatatagagtgttccatttggctgctggaagttttatttcttggtctgggtgatggtcaccatgggtttatatgaatggttccctatattatgtttcacaacaaaaagcatttaaaaagtaaatatatgtaatgtactcagggataggcatggccaaccatggattctatgctgaaataatgattcagatttcatcagcaggctaatgacactgcctatttaaatactttaagtcctgaaattaaagaaggtaatttctcaagaaggaatttctaatttatgggtgggtctattccccaccagagagacactagcatggctcagattctatgttggtcattttatttgcatttaaagtcttaagccaaatagaggtacactaataatgacaacaactactactactcatacttgtggaacactgccagatgctgttttaagaaatttgcattttcatttgtaactgagcttacttgaatcttctctctttttttcttggttaatctaactactggtctatcaattttacttatcttttcaaagaatcaacattttgtttcattgatcttttatatttttgtttcaatttcatttagttctgctctgatctttgttatttcttttcttctggagctttgtgttggctttgttgttgattctctagttccttcaggtgtgatgttaggtagtcagactgtgaactttcaggctctttgatgtaggcatttggtgctagaaaatttcctcttagccttgcttttgctgtatcccagaggttttgaatagattttgttgtgaatgtgatgaaaacggaacatttgtacactgctggtgattgtaaattagtacaacctacatggaaaacagtatgaagatttcttaaagaactaaaagtagatctaacatttgatctggaaatctcactaccgattatgtacctagaggaagagaattcattatatcaaaaagacacttgcacgcatatgtttatagcagcacaattcacagttgcaaagatatggaaccatcctaagtgccagccgaccaatgagtggataaagaaaatgtggcatatattttcatataccgtgaaatactattcagccacataccatgcaatactactcagccgtagaaaataatgaaataatgtcttttgcagcaactttgatggagctggatgccattattctaagtgaagtaattcaggaatggaaaaccaaatactgtatgttctcacttataagtgggagctacgctgtaggtacacaaaggcagacagagtggtagaatggactttgaagactcagaaggggcagagtgggaaggtagtgagggataaaaaattacctttggggtgtaatgtacactacttgggtgacacgtgcactaaaatatctgattttacttctatacaattcattcatgtaaccaaaaatcacttgtattccaaagactattgaatttgaattttttaaaaacattaataaaataaaagatgtaaaaaaagaaatttatatatactcatttattgagctcccacaattaaccttaggaggtaagtacttcataattggtagtatacttatcttttactaaatatttgtattacttgggaagttgagggttggggagaagtagcaaggtactatgatttggggcagataactaacttatttattcgcacatacagtttggaccatgagacacgagctcaggtccctcctcctcacctaatcaaagatgaaatatgtgggatgggatgaaataatcagcagtccaatgctgagtttccagaccgaagtataaagcaacaatggatatgtcagaagtctactagggtgttatttatttaaatctatttcatggaatttactaccaccttaatggcccgaaagtgttaaagtatgccccagagtaccgaattactccctaaatgtaatttatgcttgagaataatctgactaacttgatttagaacatcagaaaataagttatgctgcacataaatgaagcagcagtgtaattttaaataccggttgcacggtgaatgagaattttaatatttgcaaaattctaaaatcacttgatttattatccttatgtttatactgacatttttttgccctttgttaagttccatccatatttcttcttactgccaagaaaaaaaactttttttcctagaaatattacagaaggcaaaaattatatttgtttccctgaatgctatttttgatgtctctacttgtttctcattgttaccatttgcttcattcatgggcagcccaattaatggagcgagacaaatttagggagcacagtgactaattagatattaaattggtaaatctaactttgtaaaaccagaaaaaatatatatatatttttttcatttggaattttccttggtggaaaagagtttaaaagtagtcatgataaaaaatgtaattttacgtagtaaattcaagaatagatttagactgtgctattaacagcacctattaaatactgaaaagtgtattttaaaattttatgtgaggcttgaaatggagtctaaagtattattactcacattaagtgtcatcacatgtaaagcccatgattttattctttaatattttgtttgaatagttacttatttcaacagtaatttcaataataaaattaaatcaactttacagttttcaaaggtttagcagttgcatgctgtaataaatacttcatatttatatatttataaagtgacagcataagtcatttttattaggtccttgaggatgcaaaagtttggattatacgaggagacgagagaaaaagggaagaagggcatttcagaaatatgctaccgatatgcaaattcacaagtcctaagacagtagcaggggtcgggcagaaagtccatcctgcctccctcttgtgggcctggaacaatggtgtaagtggaaggcctgttccccttctcttcctacctccagctctgtcttacagagctacggataccatgagcaagtgtatgaacccttacggttttcttctcttgggagaatgtaaaggaaagataacttgtagaaacttgtagataacttgtaaaaaggaaaagaattcagggtgagagggggatttgttgaatttgatagaggatggcaattaccaatatgatgagtgattgagaaacaagtctgtgcaacaggtttgaaatcgaaaatctttgaggtgtacaggatcctgaaatgaagaatgggcatttatagcagtatgtcagagaaacagtcacctcctagtagctaaaagtgttggcaaaagtatagttcaagtgattgggtaggaaaaacagcaaaccaagagtggagactgatggttgctacaaaggtggagtggtaagtcgtgaccaactggtacttctctgtgctctggttagctgctgactgtttctcagactgtggtagcaggaggagggttggagttagcagtcatttgcatatgagactgccatttaaaaaaaaattttaaattatttcatttttctgactctcaatatgaaaagcacattgtagacaaattgaaaaatatagaaaaattatataagaaaatatagtctcaccagtatggaacaatgctaactatgttgcatagatttttagattctcattcaaaagcaactctttgactccagtgatgcaaatgcatgtaacatatgcaatgtgcaattcatttttaaagggaataaacttacgatatattcataggtcatttattgtgtgttatataccattgaaaatatatgaatgctaaattattagtaaacatgcaaaaacattggcaagatcattttgttgtggaaggatatattgtatctgaataactctagaataccataaatcatcaaaggcaacattcttatttttcactaactacagttagagaatacctcttcggctaccttcggttgccttttttatgctaccaaaatgctgtctgttttacaagattttaaaggttaagcatataattattcattaaatacaatgagtgcaatgtacatgtagatacattattaaattttgggtagttaataaaaataaggggaaaaaacctctagaactatcacttttaattgtttaactgataaagtgaagcttcatcttggaaaaataatttcacaagagagcatgtgcactggtagaaaagtgccattgaaacaagagatatttgggttagaagcctctctctactatttaataccattttcaccttttggcaaattacttggcctctgttttctccaatggaaaatgggaataataattgttatgctgcagggttattgtaggtgtcaatgaaatgatgtgtctggcactataaaagcacagagcccggtgcctggctattagtaactgtttaataaatgttaattcctttctctgcccaggacatcagtaggcagatgtagcaatttaaaacttctagtgttactttaaattcctgaatgaaggtagaggactgaaaagatatcatggtattcaaaagtatgatccattgcttcttaagaatagagttcagaaaagcttgacagattcctgtactctgaggcagcaccatagccggtaatctgtaggatggctattggttttgtgctcacaaatgcttgcttgggcaggccccaggaaatctggtagactgtaagcccagtaagatttcaaatcttactttacggcagtgtttttcaccttgactgtacattgaaatcacctggatgctttgaaaaataacagcgtcagtgtccaacctccagaaatactgattaagttggtctggaatggagccccaggatcactgtttggttattgttgttgctgtgttttaaatgccccagttgattcttatgtgcaactgtcttaggtaaacatacagccctggttcatattatttctgcctcagtctcttttatgactggaaggtgaccaaatgcttgtttcctaatattctttccatgtgtagtattaacacatttgacttgtactaagttcctgcagtattccaatctaaaattttagtgactacaataaaataagaaggattaaagaaggcatcgcatagtttagtatatcggttatttaatgcttacatgtgagcctacaatatgaattatatctgtcatcttattttaaatattgacagaatctttaatgatagtgacgaattattgatttattggtgtgataatggtattttagttatatttttaaagttttatttgtaataactatatgtatttatggggtacagtgtgacgtttcagtgtaatgtttcattgtgtaatgatcaaatcaggtttcttggcagatccatagcctcaaacatttataatttctctgtggtgagaaaatttaaaattctctttcactattttgaaatatacagcacaatattggtaactttgttcatattactatgcaatagaacactagaacttattactcctttcagttgatgaacaggcagttttggatcaagaataatattgaaagtgatagaatttatgaagtaatttttatccaaaaatattttgaaagggaatatattgcttccaaataatttattacaatgttaagatatttgtaaatttctagaattaaaaaaatatatttttaggaaagaaaatgccaatagtccaaaatagttgctttatctttcttttaatcaataaatatattcattttaaagggaaaaattgcaaccttccatttaaaatcagcttttatattgagtatttttttaaaatgttgtgtgtacatgctaggtgtgtatattaatttttatttgttacttgaaactaaactctgcaaatgcaggaaactatcagagtgatatctttgtcagtataaccaaaaaatatacgctatatctctataatctgttttacataatccatctatttttcttgatccatatgcttttacctgcaggcgatttgacagatctgttgagaaatggcggcgttttcattatgatataaagatatttaatcagtggctaacagaagctgaacagtttctcagaaagacacaaattcctgagaattgggaacatgctaaatacaaatggtatcttaaggtaagtctttgatttgttttttcgaaattgtatttatcttcagcacatctggactctttaacttcttaaagatcaggttctgaagggtgatggaaattacttttgactgttgttgtcatcattatattactagaaagaaaattatcataatgataatattagagcacggtgctatggactttttgtgtcaggatgagagagtttgcctggacggagctggtttatctgataaactgcaaaatataattgaatctgtgacagagggaagcatcgtaacagcaaggtgttttgtggctttggggcagtgtgtatttcggctttatgttggaacctttccagaaggagaacttgtggcatacttagctaaaatgaagttgctagaaatatccatcatgataaaattacagttctgttttcctaaagacaattttgtagtgctgtagcaatatttctatatattctattgacaaaatgccttctgaaatagtccagaggccaaaacaatgcagagttaattgttggtacttattgacattttatggtttatgttaatagggaaacagcatatggatgataaccagtgtgtagtttaatttcaacttgtggtgtcctttgaatatgcaggtaaagatagattagattgtccaggatataatttggttgctaaattacatagtttaggcataagaaacactgtgtttattacacgaagacttaattatttttgcatcttttttagctcaaattgttcatgttgcaatagtcaatcaagtggatttgaattgtagccaatttttaatgccagaaaatactgattaagacagatgagggcaaaaaacacccagtagtttattaaatactttagatatttcaaaatgctggattcacaaaagcagtatcacatttgactttacaagtcttcattctcaaatatgtttccatagtaaatatgccctttaatattaaggagttaagcatttaaacacctatttatatgataagctatttaaacacagaaaatatttttaaaaccttgtgtaattatatgtgtatcaatcaaacttgcatgcacaccagcgttggcatttgtatagagaggaaatgtatggattcccaatctgctttaatatagaagatacattttaaaaatagcactgaagtgaattttgggctaatgtagcataatggggtttctgcctgagaggcagaaacatattagagttatataaaatgttttggggtagatatagaaaccacttgccattttcaatgatatccaacccaaggtagttatatatttcaatttatattttattatcaaattagtacttattgtgaaaaaaatcaagtaacatagaaatttgtaaaagtacctccattctactctttggaggatagttgttcagtatgaattttgctacatatttcaggctgggtttcttggaaagccattgtaaaatggagatttgtatgtagaaggttaactagggagtacttttacgatgaagcaatttgttttgatgtaacttggtgtagttttcttcatgtttcttgttcttgaagtcagttaagctcttgaatctgtgcatttaacatttcatcaaatttagaaacctttcaaccatttttttaaaaaaaatggaactccaattgtacatttattaggctccttaaagtgccccactactcactgatgttatgttcattgtctgtttggtctctcttttctctgtaatttgttttatataatctctattgtcaaattgactaatctttttcaaagtctaatctatggctaatcccatgtagtatatatttttaacatcagacattttcatctcttagaagtaaaagttgggtctttttatttcttccatgtgtctactcaacatgttcagtctttactttcttgactatatggaatacagatataataactgttagaatattcttctctactaattttatcatctgtgtctattctgggttaatttaaattgatttatttttctcctcattaagtgtgttgtttaactgcttctttggatgactggtaatttttgactatatgccagacattgtgaattttaacttagcgcgtgcttgatacttcaaataaattcaaatatattgaaataaatattctcaaacctcgttctggaacacagttaattcacttggaaacaatttgatcttttgagaatcttccttttatgctttgttatgaccagaacagtgtaagtttagggctactttttccccactactgaggcaaaacccttctgagtactctctctgatgtcctgtgaatgataaaatttttcactggggctcgtgggaacaggtggtattactagccacgtgtgagctctggtgattgtttcctttaattcttttgtgaagttctttccttagctttgagtggttttcttgcatacatgaactgatcaagactcagatgaagaataaaataaagctttctacaaatctccaaaatttcctctgtgtatatatcacctctctggtattttgccctgtgatcactagtcagccttgggctgctgaaactctcagcttcatcttttaacaaaagcctcctggcaaggatcactgtccttcaatgtctgatgttcaatgtgttgaaaaccgttgtagcatatattttgtctttttttttttttttttttttttaagtgtttcaggtgtttcaggcaggagattaagttcagcctcctttactccaacttgaaaacaagtccaaaacaaactattttgatgtaatttgatcttttaatacattaacattacacaattttgtgaatatatcataatttaaaattttcagagaatgtctaatggtcctcatttcttgacagtgtggtttagttgaaactgatgaacattttatcaaaacttttcccctcaattggatacttttttttttttgagatggaattttgcttttgtcacccaggctggagtggcatgatctcagctcactgcaacctctgcctccaggcttcaagcaattctcctgccttagcctcccgagtagctgggattacaggtgcccacccccacacctggctaatttttgtatttttagtagagacgagatttcaccatgttggtcaggctggtctagatctccgacctcaggtggtctgcctgtctcagcctcccaaagtgctgggattgcagacgtgagccaccatgcctggccaactggataattttaaaaagaccattttatttagtctattttttctcaatctatagatgagataagaaaaatcattctagatgtccaaggaaaaattctttcagaaaagagctgtgaatgatatcacaaaccccccaaacagttaaggtatttctttcctggttattttatgtccaaaatcatgcatatgaacatgtgcacacacatgagcgtgcacacacacatgaatacatatacacgcacataatgtaccttaggttatctttccattctgagtaattatcgtaaaatgggtaaaatcaaccccgtaagataccttcatcgataaggcaaatcaaagctttggtaatttctgctatcttggcctttgttgattgactaataatgaataagagaatgagtttcaatatttactatgaaattattttagaagacaggatgtagacagtggctgttagcaggcaattgtttggcatgagccagtaatggttactgtgaaaaaaatcaaccaagcagcccatatattaaacaaacacacgcagaagcacgttggagtctgaagcctcatatgtacaattttcagtaaagaaataacttttagatatgaaataaacaaatagatatatgttgtaaacttgtccctatgtattttgatcaaattgcatcatatttttttcactttaaagaagagaatttagtgctttaactgagacttagtgttatcattcaaaatatactgactgccaatagcagtagaaagataatctggttccatgcaactctattttttttcctctgtcgcaagtaaaagacaaaattaagtacatgaattagtgctttttgaagatattccagagcaatataccatgccactatggagaacctctctaaaaatatcccatttttttacctgagaaaaatattgatcatgttatatgccactcaaattggtttattaaattcgttgaatgatatcagcatctcttaatgcattcactaaacaagcagtaattgagtgcatatacaaagttttatcatccaccaaaacagtgacaatccacatgaggctctaatagaagtttagaaagggggttaagtggttaaatgctggactcagaaagattggattcaaatcccaggtcctttagcttaatagttgtagaatcttgtgaaaatatcttaattcttttcatgtctctgatttctcttctctaaaatggaaatataaatgagatgtgtataaagccacttggaatagcattttgcacaaaataattactcattaaatgtaagcccctattataactaatcactctttataagtgattagttcatatcaatacaaactaagacttatttactgaattatcgtctctaaacatccacactgcagaaaaaccaacctggaaatttcataaaaccttatttttatgtagtataatttcttctcaaagcataagggctcttggattaggaattgaggaaaattccaattcagccaaacgcatctgtttcagatagctgacacttctgcctactcatttcctagctaacaagaagaaatgttaatgggagttttcaaaggaaaagctgaacaccatgaaggaaagtgacacaaataatgttagctcatatattgacagggtgaatttgtgtgctttcaagtcccttcagtgaaaataggaaagtagaaattataaaatgccctaacatttaaagctagcatgttcttggagactaggaaaaaataagttttaaaacatgggctatgatagaatgagatggaaaatgtttgtagttgccagtagaaacaataacaattaccattagattaagtatttaaaccagctgaatatttttattaatggaaatggcatctgttttatgaaataatgctgctgaatgaaccatattaaaaatgaccagtatttcctgcagaacgttgtcgcagacatacaagcctgagaccctaaaatcttaaggtattccatttgaaatcgaccttaagacattaacagtagtggtattgtttagatgaaattttttaggctttaaatcaacaaatgttaagcagacatggggagcgaaacaccagtgtgttattctgacatgaataaactgctgtttttagggaaaaaatatagtcttgttaaggttaagctaattggttttctggtatcttttgcaatgttagtgtgttttactgctccataacctatgttatatggtaaatgtgcaatatatttatatatgttgctgtaaagaaatgtaataaaaaactgtttactttgtgatatgaaagtaaaaatttattcattgtcattgagcatacagaagtaaatatggattacatatgtcatattttaatgttcacatggtcccaccatcaaatgttgaaaaacttatagtttaacgtcatattctattgaagaaaaatacactcccttttctcaaatgtgaaatgtccagagagaatggaaaattacatataaagcatgtagttatagcatggtgaccctgctgtgatctctcagatgaggaacaaaagggagaaagaaagagcacactggtgctttggagttgagagaaggcaaaaaaagagtacaaaaatgtcaaagccaagtttagctgctcttcagctctccctttagctgctcttcagctttaccttaccatggttattagtgattgaagaaaattctaaagcactttttaaaggacccaattctgaagagtttagattcagagagcacaatggagttggagtgactcctgctcaaaagtttgagacaagcgagtccatgaaaagaccgtcctcctcttaatggaaatacccaggttttctcattcttctcgccttgctttcagcactcgcagcccagaaagcccttatctaacaggtactgccgttgaaaggtcattgacttgtacaaaaatgatgagtgctgaatagatgtgcataggtcactgacagtatctgctacagagaatgagttttcgtatttttattaggatacacctaacatggcaatctactgcctcaaagaactctataggaggtaagtgaatttatattaatacagattgaattaaaggataatctagaaaaaggcatatgatgtaaaaaaatcagacacaagtatattttctgtatagtcagtttttacattgtgatttcaccagctggctgctgagtttgacggcttcttaacagccacactgctgagattcaaatgctgatagaaactttgatggaaaaatcactggagtaaatatttctaccatctgttgcccttcactgggaccctaacgttaagaataattcataccattgcttgtcctttatatttccccagcagtaataaaatttcataagattttgttttgtggtcacaaagctatcctggtttctgtaactagaagacatacactagcataagggaatcagccggaaaatttactgctaagagaatttgtctctagtcacttactttaaggttacagcaatgtgtaagtgtgggaatacattttaaaatgagcttttcaaagttattagctggtagtggcatgagagttaagtctcttaatacagttaaacagttgggcacttcatccttgcgtaaatattgttacccttttattgctgcttggaaactcctctgcaactttttggcccctatccatcttttcagaagtagtaaataaccaatttactgggagtgtggtaccaggcagaaattccgagaggggctttcaatccttgcccatcaagtgtatctttcagaaataagtatattaaaataattggataatttcagtggcttgttattagacttccgttgtccagcatggcatgtttaagaagatgacagattttcatacattattggaaagaagcaagaacaaaaaaacataacttactgtagtaaccacggtaaagaactgcttaaaatgcaggataaacatgtcatccctaagggattcccattcttagagcatgaaattatcaagagagtaagagactacaaaaaatgagaagaatgctgattgcaaattccaaatagaaaaaatcaaaacaaaactgcgcaccatcattctggaagcaatgagaagcagaaattgtcatttaatgaaatgtaagattaaagttaatagaagtaattttcatgaaataatattttgcaaggacgatgttccagccatattgatcttcgtgttttcttttcacatcccttcttactgttccctagaatgcttgtttctacctttaaatttgcttttctctctaccagagggctctaccctatctccagtttctcaccatgtcccaatctactccctctcagaatttttgtacacttccctttatatatatttgtgctctaattttatattcacagatatgccttttgtaactcccccatcttaaagaaagcacacacgtacgcacacatgcacacacacaaaattgaactctttctgggagatctgcttaactttcttcataactctgtcacttgctgaaactgtagtatgtgttttcatgtttattatcttttccattagaatgaacatattttgggtacttggtctttctcgatcaccaatatacctcggtacgtagaaaaattgattcatatattgaaaatgtaatattcagtagaacgaataaatacataaataaatttaaaaatgatacttttattgtattacctgagacaaatgatccccaagtttgtccttgcttttcatagccaaaacattctctcttacattgagcttccttcacctcttctgtgtacagagcacttaaaattttcacattgcctgatactttaacaatatgatggccctgttctcttacccattggagcatatgttaaataccagaacccatgtaacaaacatatattgtgatcctactgtgtgcaaagcagatactgcttgctgctaggaatacagagctgactaagagctccttttctctttatgagctcacagtctcatgagttcaacgtcttaaggcacaacgtctaaagcaaagggcagtaagtaaacactccagaaagtactggatctggcctaggacaaatggtgggttgtttttccagctgttatttttcctgccccctaattgacagtcctccattacacctctgggatacctagtctgacttgggaaaacctgactttgggaatcagaggcagtctctcttgcttatatatgaggaactctaatggatacttactgtcattagagaaactctgcttctagcctggctccttttgtaaagaaggttgagtccccttggagagcctgcagaacataaccatttgcatgtaatgaacagtttgtaatactttgagattgatgtgcaatttctatttgacaagggaaaaacaattaggattaaccgtggtcgtatatcccagaataccaacgttgtttccacactctaagtgttgttgggtcattatatgagattcataattttgtcctgttgtacccacgtttgcattaccattcagtcttaatttattataccctattaaaagtttttttggtaatttgttcttattgctactcaggcattaaaatgtctgcaggctgtgaaaatgaataaatttaatgtggcagcatagttctcaaaatcctggctttacaactcatagtacaggcttgtattgtaaatcctagttaacatggatttatttgaaaatccaattttactgctaatcttaaataacacatttttcaaacattttatccttgaatttctatttttttataatttatggctgttgtatgtatttacaaaaggacaatgtgtgtacttttaaatactagtaatggattgctgaaacaactgtaactttaaaacaatgcaattgttaaaaaaataaactgtgcagcctggcttaatggaggcttatgaacatatgattaagatatatgctataataagcaaattcactcaactgatagttcataggaactttcaaatttaatctcataaccagtgctatccttcaaagaatggtcagggcaatttaacgagtacatgaccacgcaagataatttcattgaagagtggctgaactgttgaaatattttctagtctccttgggatatcattaagagcagaaattttgaaatggaattgtaatgatgttcagaaaagataagtaggtaactctcttaatacgttttgtgctgctgtaacaaagtacctaagactaggtaataatttgtaatgaacaaaaatgtattggctcacagttctggagactaggaagtctaacattaaggtgtcagcctctggcgagggcctacttgatatgtcatcacatgatggacgattagagggcaagaaagatcaaaagggggctgaactcccacttttataagggaaccaaacccactcgtgagggtggagccctcaatccttaatcacctcctaaagctcccaccccttaatactgtcacaatggcaattaaatttcaacatcagttttggagggaaaaacattgaaaccatagtagtgatactgactactaccacacagggcttgggaggctaccctagctgttgcacccaagagatgaatcttctaatgtgattacctttatcattttttttactttattaaaatacttttattttacatgtatacttttgtctacccaccatttccatgtctgaccactgctactactatgtcctagcataacattccatacatccttaaaaccaagcaaagggtggagttccatctttaaaaactaaacaggcattttggacaacacattcttggcaatggaatctggacaacatttatcaaacatggtagggaaggttctcactctgcattatcaaaacgacagccagatatcaactgttacagaaacgaaatcagatggaaaatttttaacaaattgtttaaactattttcttagagagacttcctccactgccagagatcttgaatagcctctggtcagtcatctggaagcaattcttcacataattcatgaacttggcttccactttaggaagagaaccacctttttctatacttgcttgcatttttgctttaatgtcttctacagaactaggtcctttgggtgttttaggagtttttccttgttttgaaggattcttgtccttttgatcttggtgttgacggttttgagtcttttccattccgatttgacttttgtgcatttttggctggagtatctcatatagatttcttcactggcgctttttcttcagtttcctcatcatcaaaatcatcatcatcatcaaaatcatcatcttcatcagcagcaagttttacttttttctgtggaaccttgctaccacctccaggagcagatcgctttccagatatacttatgagtttcacatcctcctcctgttcgtcttctgactctgtatcttcctccccagctactaaatgctgtccactcacatgcactggccctgaaccacacttcaaccgtaagaccactgatggtgttatttcaaagccctcaagggaaaccatgggctgtacagacattttcaaagctgccagtgttactttaattggactgcctttgtaactcattgcctctgcttcaacaatgtgcaatttatcctttgccccagcccctaaactgaccgttcttaaagataactgttgctcaatttcattattatccaccttaaagtgatcatctttgtcggcctttagttcacaaccaaaaagatagttttggggcctcagaggactcatgtccatcatcgtccatcaggtggcaggacgcacttaggtgggagagaaggcagatgatgataaaggaccactgctcaagagaacagctgtgcaggacagaatcacaccagggagattacctttatcttagaaaacctgaacatcttgtgtactttgacacttctctacatttcacctaacctttaacatcaacacatttattcagaaaacttttacttttggagctgctctgtgtcaggctctatgctaggtgctcaggatattgaaattgatacaatcctaacctattcacatataatccaaggtttgctgaaattgatggacatttaaacaattgaaacatttaagtggtataattagcaaatggacatttaagccataaaaatagcatctaatagatataatagaggtcggtacaccattgatgagtcagagcagaggcaacccaaagagtaactagccagaagaattgggaaagcttcatagagagagcgatatgaaaataagggagagaattgtaaatccatgaaaatgagaaaaagttgaaaagtgatggtgtcagaaaaacttgtggtatgataatgacaagatgagaggaactcttggtaagcgtgttggatgcatggaaagaaatggcacaaaataatgctgaggacattttttattttattgttggttttgttttggttaatttcattttttaaatctagtatgctagtgttcattgtccaaactgtgaatcataaactcagtttgtggatcaacaccggcctttgatttttagtgaaacaaaatagaaaatatcagcattcatcacaaatagatgtttcacagattttttgttttaattgcgactgtgtgtgtgtgggtgtgtgtgtgtgtgtgtgtgtgtgtgtgtgtatgtgagagagagagagagagagagagagagagatggcttggatgtttatcacctccgaatcttatattgaaatgtgatttccaatgttggaggcagggcctggtaggtgtgattggatcatgtgggtggatccttcatgaatgatccctttggtgacaagttagttcatgctatatgtggttgtttaaaagagtatgagacctcaacccccacctgtttcctgctctcccctttgccttccaccatggttggttgtaaacttcctgaggctctcaccagaagtagatgccagtgacatgcttcctgtacagcctgcagaaccgtaagtcaaaagaaaaccccttttctttttaaagcacccagtttcaggtatttctttatagcaatgcaagaagggactaacacagttgtatgtgtatgtgtgtgttgggtgatttctggttgagtgtcacaaggttgtaatatggtgagtgtaaggaagtataagttttagaaaattaagaagccagttcagaaaactaatacttttggaaaatagtacaaaatcaactttacaagaatatacacagaaagatgtaatacaagatttatttcattgcagtaatttataaagttggtttagtgccttgcttttgcatgctgttttaaaaattaccaagaatatgacttcatgtgattttgaaatactcccagcaagataggtagaaaaggtattcttataactcttagacaaaaatttcggaaagtttaaacgctttatcccaaatcataaagctaataaatgaagaatctgggattcaaacaccatattttttttactgttcatcagctagaagttagaaatgttaagccaaaaacattaagtcactgctctgcctaataaatcttgaggaaactaataaaaagaataataccactgactacaggacaaggtcttcctaagagaccttaaatatattaagtgatgaagatgaaacttcttttattcataaaaatgttatttagttatgagtagagctctaattaaacttattttatattgtcatcagtaaagttgagacataacatatttattaatataattataatttgacccatagtgtattaaaagaaggatgttaaaaggagttgttattagagatgatgttagggttgttgatgataataacagtagtcataacataacaaagcacttcataatttaagaagtgccttcaattacattgttactctcatggtaatctctgtttgatatatagatttggcggattctatatcactctaagacataggttactgaggtgacggaggaatttagcaagcggctgtcaaatggaggacatgagcattggattgtgtatggcaagggctgatggtctctaagaaagcctcttggtttccacagggcagaagccctttgaagatcatagccaaggatttagtaattgcctccctttcagaataccctcaagagaaaagcccaccataagacatggttccctacaggcaaaactgcttttccttaaaatttactgttccctgaatatcagccttctttggctcattcaacatagttttcttaagtttcaggacagtgctgcagaccaaaagtttcaacattgaggaaaacaatactacttgtgcagtgaccctacctcagtcagggaggcagatgcctgcctttatgtgagggaataaggaatcaatcatatttccagcactcaagaaagccagtctagtgcagggagagatagatacataaacctcaaagttatgatatagcataatagttttaaatttccataataactgtattttaaaagttttatagaaacagaagagatgacctcagtctggaaaagccagcttggagaatggcaaccaatattaagtggcaaaagctttgggatcccaggcctccagatggagggtgatagcatgggccagacaggtaggttaggaaaactttgcaaaggacattacacggtacacagacaagtctgtgttttagcctataaaccacagttgcagaatgtgtttgagcaaaggcttttggggatgagatttgcacttttcaagatttaagtttgtttaggatacttacggtttgctgtatacttcctgggtttttacattataattacggtttgaactttaaaggaaaactgcagtttagcatacttgaaagagtgcaacttcaagtcatgattggagacagatatttaacagattttgtgatcctgtgatgcttattttcttctcagacataccacatgacaatcatttttaaacagtttatttctactttagcatccatctgaaggtgttgtgtatgttttctgcttgaaaataaagcagtgggctgggtgcggtggctcacgcctgtaatcccagcactttgggaggccgaggcaggcagatcactaggtcaagaaatcgagaccatcctggccaacatggcgaaaccccatctctactaaaaatatgaaaattagccaggcgtggtggtgcatgcctagagtcccagctacttgggaggctgaggcaggagtatcgcttgaacccgagaggcggaggtcgcagtgagccaagatcgtgccactgcactccagcctggcgacagagtgagactctgtctcaaaagaaataaaaaagaaaataaagcagtgaatgcgattaagatggatttattatgatcataaagtactcaggagtcttattttaaaagacagcattactgtaattaaaaatatagggaagaaactaatgctgttttgcgtatcattctcagctctctcaaaatcagatattaagctcttgctgccaaaggagactatactgcacggtgctcacctgcataaactttgagagggttgaattgtgccaagcaattctctcaatacataaattaaccaaatatttgttgacctactgtgtgacaagtattattccaggaaataagagatccagcaatgaaacaagtatggcttcttatagagttcccaaaaaggaaataaaaggatatacgtatagtgatatccctgaattaaatttctcttttgaaaataaaaattctatcataagctgtaactgccaacacttcaatactcattcagcagttttcagggatttgtaccttttgacttatgagaatttggaagtctaattgtatcattgcactggagtcttaaagaaacagataagcgaatgactttgcctgtatcattgttgactgtacttacaatcagaaaggggcacaggacagatgccagggagtaagtggacagcccataaatggaatggtaagaaagaagaactatagtggatttggaaagttcccttcagcattttccctagacaatctttggctgtgtttgcatgatcagtatttcattcacaggatattgagctcttgatatagttctcaaaacccaaaatgaaataagaagtctactctttatttaaattcaaattccagagagttaagtaactttccaggaggtaatctaaatatggcctccttgttggggggggggggggtgtttgaatttgcatataaatagtctcacccttaaaggaaaaccacagatggtggtaatgatgtagtcataatgtacatctccacagtggtggaacaaaatatccacagttttgctttccccagtttcagtgacccatggtcaactgctgtctgaaaataggtgactacaatacaataagatattttaagagagagaaagaaagatcacattcacatgattttcattacaatgtattgttataattgttctatttttattcatgatttttaatctcttaactgcgccaaatttataaattaaaatttatcacaagtacatatagtttatatagggctcagtactatctgcagtttcagacatccactgggagtcttggaatgtatcccctacagataaggggtaaaccactgtatcctatttgtgtgaatgctacaggtgttgtgagctcataacaatatgacatcaacactgaactaatccaggatttggtagtgagagtgatgtatttgcaaggagtgagacgtggtgcctcatccaagcagagaaataattttgaaatttgcctgacaataaaaatcacaatgtgaggtctctctttagagctgcaaagtccaattcagtgccccctagccacataagatactgagctcttaaaatgcggctagtactaattgagatgggcactgagtataacacacatgccagggtttgaatacttagaaccaaaaaggaagtaaatgctcatttattgcatgttaaaattatggttttattatagttgattaaataaaatatataattaaattgacttcattttgcttttaaaaatgtggctatgaaaaatttcaaattatatatgtgtgtgattacatatgtgtgttttcacatatgtaactgatgttacatgtgaaattgattgttacatgtgacatgtaaaacacgttacctaacacgtgcatatgtatgcaacacatatgtaacgtgttacatatataacacgttacatatgtattgttacatgtgtgcttgcattacacacatgcataatatgaaattacatgtaatttcaaattacatgtgtatattttgaaaattacaaattacgtattttgttatttttgctttacaaagtcaaatttaccctatttaataaagcatcatgagttttttataactagtaaactttgagacttttgtaggagaataaataatgcttattataaaaactgattggaaaagtgagctggagcagggagcggaggaaaaaggactagagatcacctttcttcccagctccgctcctctcccaaccttttttctttccattctctcatcccaattcaaaagtgcagagttcacagttggtgtgctgatttagaaaacagatatataaacagccttaaattttctccaggcttttacaatgaaaagaagttcaatatcaaaagtaacaatataatctgtggaaaggtatagggggctatgtttttgaggtagaaactataggtgctcctggccaagcatggtggttcaagcctgtaatcccagcactttgggaagctggggcgagagtattgcttgagcccagaagtttgagtctagcctggcctacagggtgaaactccacctctactaaaaatacacacacacacacacacacacacacacacacacacacacacacacaaaagccttgcgtggtggcgcttgctgatagtcccagctactcaggaggctgaggcgggaagattgcttgaacctgggagacagaggttgcagtgagctgagatagcaccactgcactccgacctgggtgacagagtaagactgtctcaaaaaaaaaagaaaagaaagaaagtataggcactccttatatgcagctgctcacacccctcctccttcacacccctcccccttcacacccctcccccttccccaaaatttgcaaggggaaaaatgtgtgtaattggcagtatttagtggcgtgcaaccgtgagtcatcagactgcacatcctcacttctgctagtggctcagtacccaacagcactcagtgaaaactaactcatttcaaaggtgaaaacaagtgagtttggccaccagggagtgttcaaaactgtcagtgctgaagcaaatgtggagggtgttctgtagtttgttcaggttgatatttgtggtccaacccctagctgaactactaattattaatatctgtcttgatggtgcctcaggagaaagcttctcaaagggaatcaatgttcaaattatagtaggtatcttggccatggaagttattgaattttagccaatacttgctactctttcatttatagtgtgagaatgcagtgtaatgaacctgactctcactgtcctgacttgcctttctcatcgcattcacaataagcacgtcaatacgtatacacatttcatatttctaaagtttactttatttccttattgtacatcgctgtgctgctgatggaagagaaaaggaaaaacactattgattgcaaaactgttttatctttggtggcttagattttttttgtatgatatgtaacgtcttgcatacctaaggcaacacgaagctaaatagatttgcatatagcatgtattttttccaattaaatgtttaattttgttcagagtatactggggacattttgaataatggagaaaagtacaaagaaaattcataattctaccacctatcagcacagtgaaattttatgaagaaacataattttcatgtaaatcatagtgaactcacggtaggttttatttaatacagtaattggagagctggtaggaagacaaaactggttcaaaagagaatacaagaaacaaatgcttctataatgagtgaatttttaaaaaagtattctggaataagattagtgaataagatactaaactcgttgataccctacagcctttggggttatatcctctactgggtaaaaagtcatttacatcatatcagttttctaaaatttgcattgaacttcatagcgttgtaacatgtgtgggcccaaattaatagtaaacagtaagagttgctttactctgaaaatattgaagctcttgtgagggtgtgaggagtttgttagaaaacaacgctaccattattttgaaacacacacgatcatcttttgttttacttctaagttttggataatttttcttaaattatcttattatcttatccattttcttaatttccttaaccttttaaatgtttctcctaggcacttttattgatttttggaatatagttgatatgtgctgaatttttatcatccagttttaattctactgaaaaatctaaaagatgttcatcaactactatatttcaaatgcatacatcccctttcatgctaaagaaactgtatgggaaacacagtctgacattttcaggacctggtatcattaaaagtcttgacactgttaaaattaaacaacgccttttttaaaatcaaaggatacaaaagggctgtgttggtcagaggatacaaaatttcagttagataggagacataagttcatgagatcttttgtacgacatagtgactataattaataataatatgttttcgaaaattactaagagagtcgattttaagtgttctcaccgcaaaaaaatagtatgtgaggtaatgcatatgttaattagctcattttagctagtccacatttttcaatacaatgtgttgtataatacgtgatatatacaacttatattttccaattccaataagtaaaaataaatgtaaattatttgaaataaataaaatgtgaagaacatccacttttcatatgaaaccatgagatattttctgttaaaagattaaatgtccaataaatttttgatgttaacagaaacaaaaatgtttaatatttaaatacatatttgcatgctattgaccccctgaagttcactgctgggctaagtgaaccaactatatcttaagtcaaaaatgctgaaattcttccccaaatcccaaagctcatgaaaacataaacagaaaatttccaaataattctacagggaaaataagacacactatttgatctgatcaaacaacgggatgattatggttaataatgagttacttgtacatttaaaaataactaaaggagtgtgattggattgtttgtaacacaaaggagaaatgcttgaagggatggataccccgttctccatgatgtgattattacccattgcctgcctgtgtcaaaacatctcatgtaccctacaaatatatactcctacgatgtacccacaaaaattaaaataaaaaagagagggacccgaagataagctaatatttaagctcatcatacttattaagataagcaatacataccgaaagtaatagcatttaaaaccagatgttgggggagggttctaacttgttcattaaaattcaaagtcacctgtcttgttttttcttttgtttttgtttttttttttttttttttgagatggagtctcgctctgtcaccccaggctggagtacagtggcgcgatcttggctcactgcaagctctgcctcccgggtttacgccattctcctgcctcagcctcccgagtagctggtactacaggcgctggctaccacgccccgctaatttttttgtatttttagtagagacggggtttcaccgtgttagccaggatggtctcgatctcctgacctcgtgatctgcccaccttggcctcccaaagtgctgggattacaggcgtgagccaccgtgccaggccacctgtcttgttttatcatgatcccgagagtatatatgtatgtgtacagctcatctaaaccctttttctttcaacatgatcaatagattgaacattggagatattttataagaaataatgaagacaactcaatcagcacatatatatattaaatgtggaatctataatgattgcgaagcctgaagcaaactaaatattcagtaataggttctttttttccatggtatatccatttgaatatataacataaatgccttacatttgttttaactatttaaggtttatgttgttagtgtgatgaaatggctggcaaaagtcagaaactcaggaaagtttcaggcttatatctggagcctggttttctttcttcaaggtagaacctctgtgaagtgaaaaattttttttatatctggagcaataatgtagaagcttaaatgtattatccaagttgtcataagcctattatttctttacattactgaagtgaaagacagcattaatggctaaatgccatacttggctataatttatattgtttaggactggaaatgagcctgaaatgtacatttttttccaaaatagttcatgtaatatttgaaacctgacaagtaacctgatgatttcatggaataccatcaaatataaatgtgaagttttaaagacacagggaaatactcagaataaaccccctaaccacaggccagcagaagaactagacttgagaaaatgaatgggaagatagatagtaacaaatgacttctttggcagccttatatatgcttagtcttatagactgttttatggatgctctgcactctatttccagcaagtatggcatttggaacaggaccacacgagacaaactatgagttcacatttcccacaactgcacagatagaaagagggaacaacagaatactccctttcttcttgaaacaataacttctgttgaagctcactggcttcttttcagctgtttctgctagctcctcctccgcctcttgacctctaaggcaatgctcttcaaaatttcaagactgctttctaattgaaacaaaacttataagcacatttcttcccacaaaatgtacatttatttgtaaatcatatatgaatatgactaagcatgtaaacgtatgtgaaaatagaaatcaataaatataaatgcaaacacaaatagaagcattcacagttttcttttgtgtcccagtgagttgttccaaattcctcggaggtaggtatgtcacagtttgagactataccttcaatcctagggtttctggtttcgctctcctcctaggtgatagcatccatttctacggacttaactgccatctttagttgaataactcctctatctttccatcccatatttctcttgattccaaacctgcttgttcacctgagcatatgacacaattcattggctgccgcacatgcagctttgacattttatttaaaatctttccccttccccagccctcatctatttcacagtagtatcttcttcttatctacttgattggtaagcagagtccacatgattccatcatttatctcccattttatatctaatctataagcaagtaatgcaatgcaacttctgtctccaaaaatttattttgaatttgccttctcttcctctgcatctcccccatcttaggccaggtcacctctgccctcttgccagattaggtcacattctcttactactgttgttattctcttcctattcaatcctacaccgcagcaaaatggatcttctcaaaatgtcagctagataaaggcatttctgtgcttaaggccctcatggatttatcttattaggatgaacacccaactctttattatggcttagaatacaatgaattacaacacataatgaatatattatatttctatctttaccattttcttcttaagtcaacctttctcaatccatataggataatcatattagtgcttcctcactttctaaaacatctcagggcctttgcacgtgtttctctgttcttagacccagaatgctcttccttttctctttgtgtagctaggtgcttctttccatttacgtatcacatgaaatgcagtcattccctcctccttccctcactacctcacaaaaagttgatgcctctgttaaaccatgaatggaattttactcggcagtgaatagaggaaaaaccaatggtaaaagcaaccatatgaatgaatgaatgtcaaaaatattatgctgagccaaaagtcatagacacaaatatgggtatttacatgaagttaaagcacagcaaaactcaattacggtaatagaattaagaaagtggttacctctgggtgagggttggaattgagtggacagaggcattagtgactttttcggggtaatggaaatgttgtctattttgttcaggtggtgaatacatagatacattcaattgtcaaaacacatccatccaaacacttagacttttgcactttattatatgcaaattatgcctcaactgaaaaaagtttgttttcaaaattatatcaacagttgaaattcttttaaagatttgattcaaatgagattaattctgtatccatcattgatgtatgatagttttgtatgtagttaaggttattggagataattgaaagttatactcacaagaaggctgcataatatgaagtttatctgccttgatctttaatagctttcgcgatttcaacttcttcacagctctgtaagaaggcagtgtggcatgttgaagcaagcatgtgttttagagtaacacagagctggtatacaaccccatgtctaccaattatcaatgatgtgggtatgttgctggatctcaataatcttccactgtgaaatggaatgtaacacctgactcacaacgcaaaggtatttaccttatgtaatataattcctgcgatcctgggacctcccttaatcccatccacagatgccaggttaaagaccccatcacagactagaacaagttgggatgtcaaaatgaataaatattaatcgaagggcctattgtgattgaacaccacgcagtaggcactctctaatacctaccgtctccctcctttttgggggaaacattctaaatgtgcaaaaaataaagggttatttgctttctggcacttgggatcgatttattgaggatatgttagcagaacagcaaaggtgaaacactaaaagcaccatcaatacacaggcagaggtgaagccataaagcctttattttttaaattaatgcacaatatataagaggtatgttagaatgaacgtccaatccctgaaaggatatacgaaagacattcataaaattacatgggcatgttttcttaatgttcaaaatattgttttaattagtgtattatgagtttattcatgtgtctgtgtgttgtgttatattaatcttttcttgcattgctataaagaaatacctgagactgggtaatggatgagaaaagacacttacttggctcacagttctgcaggctgtaccggaagcatagcagcatctccttctgtggaggcttcgggaagcttccagtcgtggcagaaggcagaacgggagcaggcacttcacctggctagagcaggagcaagagagacagaatgaagtaccacacacgtgtaaacagccagatctcagagaactcactcatcatcatgaggatggcaccaagaggatggtgttaaaccattcatgagaaatccacacacatgatccagtcacctcccaccaggccccacctccaacactgggaattacatttcaagatgagatttgggcggggacacatatccaaatgatatccatgtttaatcagaaaaataaaagttaacagtaacagtgattttactttgtagacctttgctaatggctgaaatctagctccattccgagaacagcctgcggtacacattttgaaagatagttgattaatatgaaagaagccttatctgtagtccttaaggccattatggtttacatatatgagtaaatattccaaagtagccatgccagttaacatatatccagagtctaaaggccactgggcgacaaaagtaaaagatacatagcaattgttactttatatcacagtaattcttgtatattttaaatggatatttgcatttgaggatatccacttaagagttaggtacatggctcttacatttaagtaacatttacttaaatttctggctgcagcaattccacataggtagaaatgaagtctgaattgagttgggggtctttgcagtgctctctctgttcattggctattttgacaatgctgagagatgtggttagccattctttttcatttcatattggcaacctagagagcaattaagccttctccccttaactagatgtatgttttactcatttctggatctttatggctgactttgaatcctagcctgtggtagaaagcatggtgtcagaaggaactatgagttaagactatgcatacttggctttgagtcttgggtatcatacctccctcatagagtgaaggaaccagggattcttcttgaggcccagacccggcatccatgttaagaatacctgtgcaattttgcttcctgatatttaaggtgaaaatgcatgtttgggtcattgtgaggattatgtgagatgttacttttaaatataggcccccttattatatgctctcatagtttcaggcaacacttgtcgtatttgtaacctcagttttaactgtaatgtttccatcaatgtccctcttacctggtacaggggctcttcatattcttggattacaaatctgtgaatgcaaccatgcatcaaaaatattcagaaaaacaatgaatgcctacctctgtactgatgatttataggtgtttttcttgtcattattccctaaacagtacaatgtaataagtatttatatagcatttacattgtattaagtattataagtaatctagagatgttttaaagtatataggaggatgtgtgtaggttgtatggaaatagtatgtcattttatatgtcacttgaacatttgtggatttgctatccgtggggatcctggaaccaatcccccatggatactgagggacaattgtattataagcagcaagagggaaaggaatctgtctattttgcccaaaatcgtgttcccgggacctagcatagctcctggcaaagagtatacaacaaatatgcattgaggagagaacagagggaaccattatccccttattctcgctgttccttcatgtaatgaataaacagtcaaatcttacaagagattttaaaccagtcagagaaaagttggaagttagttagttgttcatacattgagaagcctcgacgctgtgtcatctaggtaatgaaagatctagggaagtttagcagggagaagaagagagatgatagttgtcttcaaatgtttgaaggactgttacggacacaaaaatttaaacttgtgctgaataattccaagaggtacacagtctctcgatagaagctaaagtggggggtgacatttgactcaacaaaaagccatctaaatatcagaactttcaaaagcaggaactggtgcctcaattaatagtgtgttttctagcacttatgatacctgatcataggcaagataatgaaaaattgggacctgggagttatacatgggaatttgtttatcagttgggtgattaggagaggtggccttaaagtcctgttgtgttctaagagtctgtgattctgagtcttatttcccaacaagagaggtacagagcagaagatgggattgggagaaataggataaagataccaggaaatcctaaaggtaagaaaaggaaggcagacctgaagctaactctatacttcaggtgcttgcctagagccagccctacctacttagagaatgttgaagagccagttaaaacatctttaacacggatgtaaaacaaaactatcaaaacctgaagatttcgaatgttctaacctactcgtcagttgggcttttttcacaaatacttcagtaaataggcataaatttattttttaatgatagaaaatatctcttaaagaacttataactgtggataaaagcaccaccataaaaatcttgtggtgaaatatatatatatatatatatatatatatatatataaaattttaaatatggttagctagaatatgacgacaatgtttatgaaacacagagactcttgacaagtcccatgtatacactataaaactttaagttatccactattcactcactaagcttatacttaatgagtgtctgctgtgtcacttattgcggaaggcacaggcggtatagcattgcacaaaacatatgtggtctctgatggagtttttcagtctagtggtgaaagcagtgaatgggtgtacagatgttaaataattgtacaattagttgcatgtgtaaacgtcaaagttcagaagatgacaattgatctacggcaatgtttctcaatctctgacgttttgagccaaatacatctttgttgtggtggactgccctgtccactataggatgtttggcatcacaactgacctctgcccattagatgccaatagtactctcttctttaatcacaaatttgtcccagacatttccaaatgtcccttggggagcaaaatcatccctagttgaaaatcactggtctagggggaggtctttatgaggaagtaacatctaagaaagctggtatgtttacatatagctacagtctattacacatgtatacatatgtaacaagcctgcatgttgtgcacatgtaccctagaacttaaagtataataaaaaaaatgtaacaaaacaatacagtatgataagtgctatgggaccaaagatgaaagggttctactgcacagttatgaactcatagttaggcttttggggtcaaaattttgctgaagatatttgccacccacgtgacctttggcaggtgacttagcttattcatgcctcagttttatccaatgtgaaatggggctggaaagtcccatgtacttcctaataactttgcggaaataatatgtggttatataggaaaaaaaaaaaaatcctagaagtatgcctgctgcgtagtaaaaggaaggagaaggataaagagaaatctgcattttttcttctgtaatggggcagatagtaaatattttaagttttgtggcccaaatagtctctgtcacatttacttgattctgcagttgtggcattggaagcagctatggacaatacttaaattagtaggtgtgcctgtgctttcaataaaattttataaatacaaagtttgcaaaacaaagttgttttttttttttttgtagtttgctgacaccctagtaaagaagcaccattgtcaacgttaaaaattatcaaatttttatttttcaaagttttcaaatttgctttgcttggtctagctcatgaaataagtcaaaagtagcaagacctccacctctaaaataataatagtaatgataacctcaaaaggaaagaagaaatatttttaaagaagaaaaattattgttaaataggattattgtgcagagaaaacctaggagactcaattttaaaatctgtgaaataattttaaaaatactttatgaatagatacataatagcttttattcatattaatgactataaatgcaaatggaaatatttcattcacactgatgacaatgtataaattaaggaggaataaaaattgtagaccctataggtgaaaagcataaaaatatacataagaaaaagcaaaaattgactacgtaggattgttttaggatttaagatttattgtcattaaacttgcaataccagccaagttaacatttgaatttaatacagttataatcagaatgcttttgatgtgtttgggggcaatataatttcaaaggaaataggcaatgatgtaatttaaagtttatatagaaggaaattgtgtgcgtgtatgtgtgtgtataaattggaaacaattttattaataagcatattatggcagcaacatacacttccagatttctactatactttgaagtaattgtgatcaaaaccacagtgtgctggcataaggctagagaaatgggttagtggtttacaagtgagagtccaggaaaacatccaaataagattggatattttagttctgtgtggatagcctatttcacttaataaatagtgtctcgtaattgactattcatgtacctataagtttaactatagaccaaaaaaacgccctactagattaaggagctaactagaaatataaattcatataaacaataaaggaaagtgtaggactttataagcttcatgggagacagatttttggtaagtcaggaagcctggaagacttaaaacataaaattggcagactgaattaactgatagtttaaagcttccatagagcaaaataaatcataaaccaagttttaaaatatataatggatttagagaaggtatttacaaaaatatatgactaatggaggttaataataacaatatgtaagaaggatatgaaatggcattttactataaaggtcaaacaaatgacctataagcataataaatcatattaatctccactagtaataactacacacatctacataatatagatgttacgcctgcatttgatttactttatctgtcttttggcagaactatttgtcaccagataaaaaattctatatcattaccagaaaggtatattattataatgtttattatgttgcagttgtaaaagaaataacagcttttcaattgtttacaaatcctatagaacatttactgaaatacatttacattttgtggcaaacttggatttaaataccgtgttcgtgctttgttttatgccgttttcccatcttttctccaggaatttgattgtgcttcattgaaagctaaaaagaaaaaaaaaataattctggttttggtttaaaaaattaggttaggggttaaaaagttgtacgttgtcttctgtaaaaataaaaaacaagttttctttgtttcttggaggctttatattaaatggatttttaattcatagacagcatattgtgatgaaatttccccatgagcttcacattttgtttcaatagcagaaactaacttggttgcagttactgcccttctgagaacagtgttctggaataattttgacatacatatgtatctctttttaaaacatgtgttaatcttttcataaagaaagttttcccagctgtgtcacctgtgactccaactttctggggggacagggatatgagatgttggaagggaatggcttgaagaaataaagtgcaaaagacgtaatgctttcctgtggtagaaatgtattcagtgaccctgaatgaccttcctactcttgtcccttcatttttcccacaagtatggtctgggcaattataaaaattgacatttgcagtgggctcttctgtaaaagatgctcaatcagaaatgatttattttagaaaaagagatgatataaacatatatatcccctgtctcggaagtgtgaaggttgaaaagcaaggagatgatcttcaaagtgtctaaaatattgatttgtaacatcgttttatgaaagtgcttcagattattttttttcttggatggccccttatgctttggtcagttgatgctaaaatctgaacttctttattttaaaaaaaacttttaattttgaaaaaggaagttcacggtgctgtctaattctttttagatagtcattaatgtaaatgtaagagtcattctgagaaccacatctgctgatatgttccgttaaattacaagttctatgtgtatttgctttgctttcatacaatgaatcttctttactctcttccccacctgccagaaattgccccactcaacgttcataaaaggtccattttcaatcgctatatttatttcagaagcagagatatcatatattcaaattttagttactttccaatatcaagctaataactcacacaaataaatcaaactacagcaaaacagcaatctagcattcaacaaaacctccccaatgcacatatttcaagctgtagatatgtatcatccaccatgctgaaataatgtacatgttcaaatcaaatggaaaactagaatcaaaattgttgattacttcttatcagggcattttattatatttaagaaaaatacaaattaaatcattttcaggaagcaatccttctggctaagatttttttagcataatgcttaaagttaattgttgatctttatctataaattcaaaggtggactaaaaatgcagaatcaatcaggtagtccattttgcatcaggtgaaatatataaagcataaaacagcgagttacatttcctaacaaaattgaattacagtgagtaaaagtgacaggacaaatgcattaagaaaagatggactgaaatggatagagtagaatatatgcatctataaaacacagtcatatataatacactcattttttttcttacgagtgtgagattaatggaagaaaacaacaataataacaaaaccagtgtgatgtgtcagatttcaccttttaattaaaaaattattcacttcagaggggaattttctttcttgggttagctcaatcatgtcagatcttgttcatttaaaaggtcagtttacttgccttctgaggtttttgtttgggaaaaagaaaagaaaatagattttcattggtatcctgggtagaattaattgtttatcattcatttttaagatctccgagaggcagaaaaaggggaactgtgcaacccttttgtccttctggatctcaaaatgaagggatacattctgctacatgaaatgtggaattaagaccatgatgcaacatgataaacaacacaaatttgggggtgtctctgtgctatacattattgaatttttccatgctatacactttttggatgtgtctgtgctatttattcagtttttttaaataaaagtttttgtagactaaattgccctctctactttgcatcgtttttgaacaaaggattttcaagactgataagctcaaatgtatcatttattgtattcaagtagcattcaatttttctttagaagtataatttgtagatattttaacacagaaaacttgcaacactgctcatgataggcacttattatatattttttgaaagactatatggataatgattctaactttgacttttcctgttttgccttcactttagaattaagcagagaatcaaatccatattcctgggggcgatgcttggacaacagtatctctttaaagatctttgtgtgagtcgaaggtgcagccagactgggagttattgtgaagaaacagattcaggaaggttgagaaacttgcctaaggctaatcagatagttactggcaatgttgtttctaaatcactgtttggctccctcattcaatgaatctacactatgtgggactgcctcttgctcctgacatcttttgctgctgaaataaatgaactcaaagcctagaaggtagaaaagagggagttcagaattatattcaggcacaaataccaataaggctattgcccccagaactgcaacttctcttggtttaacagataactatttagctgtgaggtacaactgaggaagtggacacacaagttatcaggagattctgatgtgccagtttatatttcttgtcacaggtaatgattcgaaatttcttaaaacagctgtcctcacagtggagtaacctgggagtacatgaaggcattccaaggagtaggcacagatagttttaagggaatttatttctagatcttctactttattttgtactcttcctgaaaactgaattgcctgaaaaaaaaaaaaaaaaaaaaaagacatctgtagtcaagacctcaggctgtttctcctttctaaccacttgccttttctaaccacttctcccaatttaagaaaaaaagccttatatttcatccaactctgatcttactaaggcttcaaacaaaagaagcatgaatgactttcatgacagggcaacatagctttttgcaagaagagtggttgctaactctttgctttcaactgaacccgaagagaagacctgataagttgtcagccgatagatcattaaaaatacgttttggtaagcaatcatcatgtacttttagcatatgccatagcaggagcacaaatgattaagcaatgctactataatacaattccttccgtttctttctactcacctatttgaataagatttttcatcatttacatctatacagacaaaaattagggatagaattgatgctgaagcctttccaattgtagaattaatttatattcttctgaaggtgtataaattgttaaatacccatccatcttattaagagatgtattttcaataaaattttatttttatgtttatcaaattttataatatacatatattgttttggtcaattgcacgttaataattgtaacaatacctcaattgaaaaggtttgttttttacatttaggacttacagtaacagaaaaaaaacactcattgtgtatacatactgtttaagaaaagtatactaggtgatcaataagattttttcaggcataaacatatatcttagttttaagatatcgatatttacaatgtccctcaaattatattattttcagtcatttaagaatgaaaagtacatttcgaatgcggattttaaatctgcaagggttgactcatttttcaagagtctttttaggggatacagaagcaagaatgtttggagttccctgatcagtatctttaagagaaggtatttgttggtagttcctagcaaattccaacagcctgatgctacttaaaagataatagtaattattttaaataatgcttctgataaaaaacattcatgcacactcagtttaaaaagatatttaaacatttgtagttgtagtttgggaactcatgatacaagtacagtctgtaaatgaagctcttagtttgcaaatatcagagataagctattaaaatgcagaaattgaaattgccctgatatatgcataaattagtgtcatctccatcttgtcagttagagtattttttagattctctctatgtatacatacatatatatatatatatatttatatatatatatatatttgtgtagctgtgcatgtgtgtatttggactaatgggtcaaaggacagtactaacccaattcaataattaaagaaaacataattttgagaattagctttatggtaattgtttgacttaaatgagtagatcagagaagaataagggctttcccttatttaaacaagcttcatttttttatccaaacatttacttagctgattaagcttcacttgtttattttcttcaaagcattcattcaggtgggtactgagtaaactgaaatatcacaccagggaacttcaacaccatccaagtcttaaaggcttcacttgttcacagttggcatttagtgaatgtctaggctactgataatattgtgagtaagttggcagggatcataagaaatgataaaatacagttcttgaaaatgttatggtttgaggaaaagatctatgtttggaattagactgacttggattcaaactctggctgtacctttgggacaaggtgttcagaaactctagcctatgttttttttctgcaaaatgatcctcttttccaggattcctgtagagattcaaagatatgtgaatgtttagaaaaagaatagacttttgatcattgttaattcccttactttccccaattagacttgtaagactgggaagaaagctacacaaaagattgaacaaattatagctgacagaccatagcaaaagatacagggcaaaacttaaaggggaaaactacacattaaattattttaaaccattaaatagcactaacttttgtcagatattacaaccaaacaccactcaaattaaagtaaactgaataaaatgcctgtttttttctgtttactgatgttttcatttgcttcattcatttattggaagatataaaatgtgttagacactgttaggtgctgagtgtataaaaaaatcttattaatacaatttaaacacgcacacacatatatatggttataacaattgatgccatgtatgtactgtttatatgcctatacattattccacagacctggggggagggggatgtagagtcttaccagaaccataggaatcttctcacatcaacatttccttttgaagtttgttcatgaggcaccatccagataatactaccatctgcaatgtggcttgagaagatgttagatttttttattacacataataaggctgtaaagtatttctgtatttaggtagaggtatgtaatacaatatgtatataaaattacatatccaataaaatctggtgttaaataaggactagcttctatgataatatagtctaaaggcttttcatttggtgttatagaaattatgtgaaatatgtttcctggagtagaattattcgcatttcagctctctgacagtggaagaaaagctagagggagaggtgaacaagagagggagcataatggacaaagctttgctggaagccaaaccaccacttcatatgtcaaatctgacaggcctcccattttaggtgtgctgtcattgaagctttcagctgcaccttgcctgtggctaggctattttcaaagattaaaatgcgaaactggaaattaaatgcaacttaattcccaatttaaatttccattatttttgaaaagtaaaagattaaaagaaatgtataattgcaattctggtggaagaggtaattataggaaaggtgggatgtatttcaagtgggggatatagcttactgcagcagagaggaatctaagctatcattcttttgaaattggtctggaaatatgttttcacatggaaaatatactatatttttaggaatttccttgtcatattactgtatccttttctgttagaatataaattctgaattccctattccactgtagatctgcctccgattatattagctcttctgaagttatcaaaaaataatgagatatacaatattccatatatgtcaaagcaattatttttaggttaagtaataaaccaatgacctttaacccggtaatattctgggttgttcataaaaaaactatattcaggtaataatgtctttccacttaagcaactgaaaaaatacacaatacttaacatttggttaattaaatacctactccagacaaaaggattttctgttttcaagttatcttagcaagctgagcaggaagcaatgatatatccaatcagaatatccatggaagctctgctacagtttcaaaaagttctcatcaggcagcttttaaaatgcctactctgaaaatggtccaggttaaagaacaacagcttcctcgtcagatagcagtattgcttggccatgtttcttcctagcacaaaaaagtacctgctcttctctgagtacctacattctaaggactatggcttacataaaacagcatgggttggggcaatttccagcacactgctcactctcgaaaacgtatgatgcaggtgagagtaatgtttttgtttgaatctgctttcactcgtggaagatgaaactacttgcaaagatctgtactttagctattatgagtaacaaaagactcctaaaatattgcacacattgtggggatggagaaccatcatcctgggatttgatggatcctatggtttggctttgtgtccccacccaaatctcattttgaattgtaatccccacaatccccacatgtcaagggagagagaccaggtggaggtaactgaatcatgggagcaatttctcccatgctgttctcctgatagtgagtgagttctcacaagatctgattgttttataaggggctcttcctgcttcactgggcacttcttcctgccacctgtgaagaaggtggcttgctccttctcaccttatgccacgatggtaagtttcctgaggcctccccagccatgctgaactgtgtgtcaattaaacctctttcttttataaattacccagtctcaggcagttctttatagcagtatgaaaatggactaatagagacgtgtctctcagaagtcacagtgatgcttgaacggatccagagctccttcttcaggaaggtcccaactcattctgaagggtctctccaagcccacctctctctgtaaatgggaaaggttttactttgagcactaaaacctgccagaattctcaattttcctaacagtgtgttaataaacacctactcatttagtatccaaaccaggtctgtatttctcaattagagctcaccaggctttcatcataaagtagagcttcaaattgtctgcaatcccactcctatcaaaaacctagaaggaggtaatatttcagagtaatactataaccagatgaccacatctaagaaactgctgaccctacgatgtaaccttctgtccatttttccctttggaaagtctaggatcttttcttataccagcaagttacaagcctggactacactaacttgctttccgcagaagaaaacaccatgagttctgttttcatattaagcacttagtctccatcagacatcaatcgagaaaaaatcattaaaaatcacattttatatttgatgtatatttctcaataatcctatgtattagttcattttcctactgctatgaagaaatacccaagactgggtaatttataagtaaaaagaggcttaatggactcacagtctcacatgactagggaggcctcacaatcatggtggaaggtgaaggggtagcaaaggcatggcttacatggtggcaggcaagagcgtgtgcaggaaaattgccctttataaaaccatcagatctcctgagacttattcactgccataaggacagcacaagtatttagctccctcagcacagaaccatccccgtgattcaattacctcccaccaggtcactcccatgacacatggggattatgggagctacaattcaagatgagatttggatggggacacagccaaaccatatcatcctatttggatgatcaatattatcaaggtatgctcccctgagggggcgtcctttttaccatttaactccaggacaaaagtttatttctttgtaaggacagtgtttatttcttatggtcctattttctcctaagatccagacaccaaaatggccatctatcattgacttaactcctgaattttgcttagagtaacagatttagtgaatctaaatattttctggctgtggaatgttaatttatacatgttcaagttacctttgattcatgtgacagtttgtgccaaaacacactcattatcagaactcagatcattatgttggctcttgttttcgttactaaaggaagaaaaacagtttctcaaaaagaaaattctgatacctaggaagaccattatacctcactcttttctttatctcatcaccacatccaatattataaaagaacttacaaagtaaaaagaaaggtgttctgtagatgtagcgcctggcttgtatggtagcttaaatgaacacagctaaaaatattttatggctagtgtccaaaacagtctggcaccagacaaaataagaatatttaaaattatattttagagttactttaagaggaagggagagagagatgtaggcaggaggaggaggagcaggaggagagggagagagagagagagagagagagagagagagagagagagagaatctggggtttctatggaagggctaagaatatgtagaaaacagtttacaaagaaatatggtccaagaatcgtgtgtacacacacacacacacacacacacacacacacaccccctggaatatttttcagccttaaaaagaagaagatctgtcatttgtcccaacatggatggacctggaggaccttatgctaaatgaaataagccagaccaagaaagaaaaatattgtatgatctcacttatatatggaatctttttttaaaaaaggtcaaatatatacagatagtgaattaaacagtggttaccagggtcagggtagttgtgaggaaatggggcaatgtaggtcataggatacaaatgattaaaatatattaatatattaaaagatataatatacatcatgaggactacagttaataatagtgtgtattcaagatttttgataaatgaatagattatagctgttcttgccacagagtgaaaaatgggtaactgtgaaatgatagatatgataatgttctccacaatggtaactattttacactatatatataaatatctatgcatcttacaccattatgtggtatcccttaaatatatacaataaaatttattttacaaacacatattaggaatgcatattctgatttttaacaatagttaacctcattaatatatttcacactatcatttctagtgtacatgaaaagtagtttattgacattagttgtaaaaaaaaaaaaaatggtcttgagacttttgggtcagagaatgttctggccataaggtaggtttctgcttgcctactagatatcttaacttcgatttcctgaacatcccatcacttcagaatctctcaatcctttctaacatccgcaacattgtttttctttctgcatttcttatattgactgatggatttataattcactttctctgaaaaaccctgcagttatcatatatccctatccattctggctctttattgcccaaatctctaccaaaatcctgtcagcacagcctctgaaatatttctcaaagcatttataatctggctctcatcaacattttcaacactctgttttatcattccactattttacatcatttcattttcatttttaccacaatcactcatccaacaaataagtatttagctccctcagtaattagtattattattattaattataactagatgctgagcatacagaagtgaacatgacagacataatcccagcagggatgtcagactttatgcaagtaatcaaccatgatgaatctcatgagattctgagagagagagagagagattgagagagagagagaaaggggaaccactggtgtccgagttagaaatttgaattagtatctgggtcaccaaaagcttctgtgaagaagtgatatagacttggccacacaaaactaccgtgaaggtggtggaaatttttctatgcagagtaccacatttaaagagctaagcctgagagtgtcagagataaaggaacagaaagaatgtgacagcagattatgtttggaagaaagatgttcaagagaccaagctaaagaggagatggggctagaacctggagggtccttcgggtcctgttgggagttttttctctgcccagaagggctttgtcacgtggttgtcaggaaagagtcatgattagagctttgattcagagacttctttcgctgaagtgtggagaatggttcagagagaagcaaatctgaatggacaaaagaggttattattgtaatcttggcaagaagcgatggtggtcttgactaaaatagttctagtgagaatgtgacaacaaacctgagaaaaatacaggagacgtaattgacgggggttagtgttaagttgaacgattgcagagttgaatttgaggaaagtgtcatatatcattcccagtttctgatgtcatacacctctggagataacactgccatttcttttgaaatgggaaaataataagtgatcagtaagtacgtattggataaaataatgaatggttaaatgcataaggggagaggaaaagagttgcagagaaagagagtaaacgtattttggatgtgttaattttgagatacctttgaaaaatccaagtgaggggttgggtagtcagagaaatgaatgtggatgtcaggacgaaaggtgaccgtgatgaactgtatgtcttcctctaagcacgttatacagcttcatgtcacaagtgactcacttcatgtcacaagtgactcacaaggtcacttgtgacaagcatttgcctggtgcttcatccctaacctccctttctatactcagctaaaatgtcacctacaatacttcttccttgactccaccgtccccactttactgatatgaatacattttaataaaatgatataataatgcttagtttgtaaacctaatgttcctcaagtggtataattatctgatttgtatgtgatcatcaacccaaccatattaggagcaccttgaaggtagaagatttaggttcatgcttaacaccacatctggaccactgtggatttaactttctacaatgattgtattcattaatatattgggtgcccactatattccaagtaatatcctgcacactacgtacaaggaagcataggtcccgtgtgctcatgaaactgtaattttagtaagcagggataggatacaaactgagaaaggaaaacaatttagaaagtgggaaatattatgcacagaattaataaaaaagagaaaaatcttgaaaaagtcttcaatacctcacttggaaggtgattttgaagaagaactgatggacaaactagagtcagccatgtaatgatgtaggggcaaagcattccgggcacaagggacagcttatgcaaagaccttaaaaatgaactagctttgtatgttggagaaggataaagagaactaaggtatctataaggtaattaggaagaggatgagttatttagtcccttagtctttgaagcacattatctcatacttcaattgagtttattcttagtgtcattcttctggatgcaatatttgagataaatgtcttaatgaacgttcacctccctccgtagtaatgcctgagtgtcacaaaaactttttttgtttacatacgtagccatctaatggaaacataaaataggaatcaaaagttgagtttcatgtacaaaaggtaaggactgtacatgtggtcataacaacttcaaaagcacctgaaggtaacctttaaggaagatacaaaggctaggaaatatctaggatccatgaagacagacttacttaaggtcatagtgtgtccagagttggttcccgccggtgggttcgtggtctcgctgacttcaagaacgaagccacggacctctgcggtgactgttacagctcttaaaggtggcacgaacccaaacagcgagcagcagcaagatttattgtgaagagcaaaagaacaaagcttccacaacgtggaaggggacccaagcaggttgccgctgctggcttgggtggccagcttttattcccttactgtcccctcccatgttccatttctgtcctatcagagtgcccttttttcaatcctccccacgattggctacttttagaatcctactgattggtgcattttacagagcgctgattggtgcgttttacaatcctcttgtaagacgggaaggttcctgattggtgcgttttacaatcctcttgtaagacagaaaagttccccaagtccccactcgacccagaaagtccagctggcctcacctctcaatagcattaagaatatagtttcacgagcatatatgaatcaaaacttacatttgccaattttatttgcttgtttatgtgtttccaacatgtcttgtcttagggccaaatgtttccctagagaataactattccaactatcttagttgctgtatttttatgcaaccttcaactctccatactaaaatgtctccagaatagaaaataaatcttttcaaagtttcaaaagaggctctctatatattccccttaaaagtaccaggcagacatatttctaggtttctaacattgcgtgttgccaggaagtatatccaaaccatcacaagttattcatgtaaccaagcacacttattggagtgcttctgcttctgttcttgcttgaaattggaagctccttccaggaaaaaaaaaaaatatctatagaaggggaaaaaagtaattttactttgaaaataaaatatacgtgagcaatagttttattctgtttttaatttaccatagcttccaaagacaacattgttttatagtaggggttagcaagtgttttctgtaatgtaaacgtaaagggccagagagtaaatattttaggctttgttttctatactctgttgcaactattcaactctgctgttagaatgttgaagcagtcatagacaatagagaaatgaagatgtgtcattgtgatccaataaaactttatttacaaaaatggcaatgggctagttacggcttgagggctgcagtttgcagactctcacttcagagctaacagttgttgtcaggagtcacttgtttttggaaacctacaatgaggtactataacaccaaaaagagttatcccttcctttttctctctcactttttgaattatgagaagaattagaaatgtagttaatgataatgtccaaccagtgtaattatacttgttagaaacacagctggaagcctgttgtccagtcttatttctcctctgtgatcctcattttcagaggttgaagtcataagtttgccatgtctactttctgacaggggaattataataatgtggagtcaccttttgtttgtgactttgacaatgcttcattgacttactcaccaattttctaatttttatgaagactttttgccgaaatgtagactcagtcttctctcttgtctactctttctataacaattaacaatgaacttatttacctttttaacatctttttaaaaattttctatacaccttgaaaatgtgaatacaaagtaatgctgcatcatgtatattgccttattcacacatagcctcttatggtatatcatataaaaatggaacaatacagcaacaggttgaatgaacagtaatcaggtaacaggaaaatgagatgtctttaatatttcacttaaaaactcaatttcctaaagcatacatataaatatttggaagtatagttagaagaaaaatatctttaaaatattttaattgattagtcttatttataagataatttttaggaggctggttgcggtggctcacacctgtaatcccagcactttgggaggccgaggtgggcagatcatgaggtcaggaaatcgagaccatcctggctaacacggtgaaactccgtctctactaaaaatacaaaaattagccgtgcatggcagcgcatgcctgtaatcccagctactcgggaggctgaggcaggagaatcacttgaacctgggaggcggaggttgcagtgagccgagatcgcgccactgcactccagcctggtgacagagctagactccgtctcaataataatcataatcataataataatttttaggaagcatcagaaatatataagaaaaagattattttcttaattgctttactaaaaacacctctatgatttttcagtaaaacttgattcttatgtcatgtgtgagtgtgatctgcctctcttgggatactactgtactcatgaggagtgatttttttctccaacgacctctttgtcacgtcaacaggtcacaggaatagtgtaccctaaaaagccacctgccacatgctgctgaaaatgtaaaagtacacacatacacacacacacacacacacacacacacacacacacacaccaaaatcaggtatcacaagctgaaaataaaattgagtccaatttttttttaattgagcagttaatgtccttaaaacaaaatcctatactgcaacaaatacttagccagatcattctgatacctccaaactgtggtgtattccaagatacctctatgatctttgatttgatccacagcttttcagttatcatgcaaataccttcaagttttatctcatttctcagtgcaaactcattaaaaattttcagctgaattcaattttataaacatgttgtgaatgtcctctttatataagcaaggttgtaaggaactggccacataaacagaaaattgaataacatatggtttctggccttagtgatctcatgtgtgagttaggcatatgggcaaaatcagaacactatagagtataagtctaaaatggtagtattttataatagaggatgaagagggtgctgtgggatcataggtgacagatataactcccgttgtgggacttgagaaaggcttcacagtctggaaacatttagttgctattgaacacaaaataagactcactgttgagagaagggagagggagggcatttcaatcaaattaagattctgtggcatattcggaaactgatgtttttaaaaagagtaatgtttattacattcctctacataaattatatttctatgtaatatgaatgacaaatatttaacacaaaatgccttataacatttgaatgaaatccatcatatgacctgttatctatttccatttcctttttgctcatatcattatgaacaatgacctgataaattttttataagactttgctgaattagtaaaggattattaagtttagaatgaacaaagctgaccaatcattcaggcaaatttgaccgttttgttgtcgcttttcttatttctgaaaccatacaattccctgaaatgaataagtacatatttgataacttcctaaattaaggctcaaaacactggtaatctactgggctttcatttgttccttctatttgtctaatcctatctatatttctttatatgagctatgaaaatattagatttattaagttgtcctttatcttaatagagaagaatgtttttctatgacattaagaggaatttgatttttttctttaatgatctacttttaattttggtagagtagcattgataagatcaatattacacattgttaagtatgcattacatgttgataagataaatattacacttaaaatatgtttatcaaatgtatgaatgataaaaacgaattctgaaatgtatgggaaagatcttgaataaaggtctatgtacatttcaaggatgtctacatatgcaaattatcataatataataactattgaatatgattatcttcacatactttctttatttttcatctcttagatgaaattgggtattgttttcttatagctggaacaaagcattacagagaattcttagtgtgatttcattgaaactcactgttatatgagttcaacaaagtttaaattagtccatgacttaatcatcctttataaatcctatcactagtattcggtaaggacaaagtcaattaaaaaattagcaacagaagcattaaaagaaggattaataaatacaaaataagggatgtgatatctttacgtattgctgagatgttagtgctaaggaaaaacttccctgttcataatgtgaggtgggaaaaagaagaactattattgtatatttctcctctctaaaactgcctatctgactgtgtttttctgtgtcagccgtattaacagatgtttaattttactcactttagtatataaggcatcataatgtatgaactatttcaaaggccctatgatggctaattaaataaaaatatattaaatattagctggacaaaataaaatatgtattaattttggaaaaagtagatcaaggttttgcagatcttttcatatcaatatattcatttgctgaataagcttttattgtttaccaatattactagttttatagagatgtagatatcaccacagtatgactaattttatagggacacagatagatagatgttattttattccaatcttatttttacatataacaggtataaatatgcgcttgaaaggagtatatcacttaggagtcagtcagaaaagtaaagatcttctagtctaatacagtggttctcagccaggggtgattctgctgcacgctgagggataaattggcaatttctggagacatttttggttgtgacaattgcaggagtgttactggtattcatttggtagagacagagatattggtagacactgtacaggacacaggaaagtctcttacaacaaagaattattctgtccaaaatgtcagttgtggtgaggttgggaaacactggtctggaagaaggaatttactatgaggaactagttacgaaagtatagagacatttaacaagctgaacaaaggatagtgagatggctcagagattagcaactgtggcatgaagccactactacgtttaggtaaaaataagctaccatttattcttatagtaataataataataattattattattattatttgagatggagtttcgctctgttgcccgggttggagtacaatggtacaatctcgactcacttcaacctctgcctcccagattcaagcgattctcctgcctcagcctcctgaatagctgggattacaggtgtgcaccacccctcccagttaattttttgtatttttggtagaaacggggtttcaccatgttggtcaggctggtctcgaactcctgacctcagatgatccatccacctcagcctcccaaagtgctgggattacaggcatgagccaccacacctggcccactctttcttttttaattattgagaaatataaaaatatgtcaaaagtaacaggtgtggtggagttacagcatgcacataatgggatacagcccattatctaatctcagatggaaactagaaaaaaaagagaagatctttgctaaagcacagattatgtggaaaatcatttagaaaaatagcttatcacaacattaaaattaaatcctttagctgatcatttttccttgctattttttcttttaaaattgagaagacagtgagttttttttctttattgtcattatcttgatgtcaaaaaataatatgcacattataagtgggaaaaaagataagtcgaaatgaaatgaaacaatgcgaggaaaaaaatgtcacaacactcttcaattagaaaaaatgacccccatctttcctccaaatagaaatgacgtaactgaagtagtggaactttctcttccatggcaactctagagaaggggtagatggcatgggattgtggacagatggacacagaaagaggcctcatttattgttattgttaaaacttttacttctagtaatagtgacacctccttcagcatttctttatcaattgtcaatattttttggatcaccagcatcaccttctatatgtatgtctagaaacctcctgttatgaatttacacttctcagagtcaagacagaaatgctgtgaattgggcgataaataaaataccccccttttattgccttgctttgtctcttaaagaaagatgcctgttgggggactatgagaatgctttgtgcttctggacctcaagggacaaatctataataaaaattatgcatagtgatgagaaatatatataatgcaagtttgtagagatcagttaacttatcttgtctaggcaattatttctaaacaatgatttcaaatcattaactataatatagcccattcataccctccatttttgtcaaatccctgtcaccttcaaggacttggccatcccataggctgctctgcttttaatagaggaagatgctgtaactcttggtaccattgccagttatgaatttatccattaatgaacattgcatttaaggcataggtttatctccttctccaggtatgaacctgcaggattcctacctgaagcttaagggagaataaatccacctgggacaatcaaggacagatcaaccaatcagctcaaagcaggtgtgaattacacagtttatttgagtgacaaggtagctaaagcagggataataaaagaagggagtgggttgatgtggacagacgaactatggctttaggaaatttggtagggactgaaacatattttgtgtaatttatgtgggtctaatagcttttgaaacttgtttacaagacctgtgtaagtggtactggcatattcatgcatgagaaaacatcaagggaaaacttaatagttcaaggaggtgacaaagaagagaggaaccaattattttcactagccgtcaaaagcaagaaaataatcagcttgagcccttcggggaaaagataggttaaatattaagtaacagtttgttattattccaagtgttttcttaaagttgctcccatactttcctgttttctctgagggaatttagtttttttgttggtttttttttttttttttttataactgtcattggtcagagcttgatttgatgccagtcaaatttttttaaagagattatgaaaactgcttaaactcttccaaagggaagatgggtcattcttaacatgtgtttcaagaggaagagcataagagcattatatggtaaggctgaaagcagatatcagcgtttaggggccatgaagaggtagagctcacattggtaggatcattgactagaattccagagatcaaaattgtatgttagtctagcattggggaggacttgtagctagtatcttcattctagcttgggagcctaggaatcaggttaggcatcttgcacaggaatgggccgatgggctaaaatctccttgagagagatgattaatccaggacaaaccaagcagtcatgccaatgaattactttaacagggtacttcatatcctcatcctttgggcagcacggtcttcagagatggggcaggccccaggctgcagttgagattctataaactaaggtcaaaaagatgcagcagtgaagaagtcatgcttatcttgtataaatcatgttttcttttctttttaatgaaaatgtacatttaacacattttaaaactaaatattgaccctaaaattccaaccaaaaaatgctacataagtggtatttatttttgaatttccctcatgctcctcccactgtggggacaaggagtggtggtggaagagagatcttttagcaaacctgtgagtagagaattagaaggtaatgggaggaaggtaaaaggaaaacatcatagatggataggctcacaaacattaaaggccttcgtgcctgtccttcatgcctattcatccctctccagtatgtgaatcaatgtacttgttaaatattcattcacctcacatatttagcattaaccgtgtatcagggacgttgttagaccgttggtttacgatgatgtgtaaaatatcatttgtaactcagactaactggaagtgctcaatataataagatgtaatgttatggaacactaagtctgtgctgaagacttatctcctttaatcctaaaacaatcctggtgggtagtctcaatgatcatctccaagtcacagttgaggaaattaaggcttcaagaagttaagaaactggaccaacatcacaaaggtagcatcagagtgacagtttgatttcaaagtgtacttgacttcaaggcccacatttccttgcacgtttaatattgcctttctcaggtaaatataccattaaatgtgatacaactctaagcatttgaattacttacaacgtgcagagttaaaaccagcattatttacactatacttcagctcgtttataagtgaactattattttgtggactaacctatgaaatgtaaccacattgaattcctctgttaggtacaggtttggtgattccagggaatagagtatgactgaatgcacaggtaggggtgaagtgaacccggtcagaaaatttagagagcatcgagcagatcattaagcagctgtctttcaaatgtgcagaacacaactcatttgtaatctagggactatctgtattgattcttcccagggaagttacttatttttatacatatgtggtgtgttctgtccataataccattctacatggtaatgctcaactttattatttaaaaaaactgctaataatgaggtttttctttgtatcacagaagcagcaggagcaagttttctttttccttcccagtttttttaagtactgccaaggaatgtgattttgtcagacttgtatttcctattaagccaatctgcatgactgttccttctactagctttacctgttcactcatttattaattcatcaaatatttgtagagtgactattgtgtgccacatactaatataggcacaaggataaccaaaaacagacaaacgctgtcctttcaaggagctcatatagtaatgggaagttaggaaaggagaaaataaatatgtggtatttcaaatggaagtattaaagtgttaagaagaaaagagaaactaacaagatagggaaaaagtgacaggaacatgatgttttattttttatttatatatattttttgagacagggtctcattctgttgcctaagctggtgtgcagtgacgtgatcatggctcactgcagccttgacctccctgggctcagatgatcctcccacatcagcctcccaagtagccaggtctacaggcatgtaccacgatacccagctaacacgttttcttttcttatagagacagagtctcactgtgttgcccaggctgttcttgaactccggggctcaagcagtccacccacatctacctcctaaggtgctggaattacaggcatgaaccaccatgcccagccgaaattgatgttttatatatggcagtctgggcagacctctttgatgtgatatttgaacagaaatctcaagagagggagtgtattagcccgttttcataccgctagaaagaactgcccgagattgggtaatttataaaggaaagaggtttaattgactcacagttcaatatggctggggaggcctcaggaaacttaaaatcatggcagaaaatgaaggggaagcgaggcaccttcttcacaaggtggcaggaaggagaagtactgaggaaagggggaagagacccttataaaaccatcagattttgggagaattcactcactatcatgagaacagcatgggggaagccaaccccatgattcaattacctccacatagcctctcctttgacacctggggattatggggattataaggattacaattcaagatgagatttgggtggggacacaaagcccaaacatatcattttgctcctggcccctcccaaatctcatgtccctttcacatttcaaaaccaatcatgccttgacaacagtactccaaagtattaattcatttcagcattaacccaaaagtccaagtccaaagtctcatctgagacaaggcaagtctgttctgcctgtgagcctgtaaaatcaaaagcaagttagttacttcctagataaaatggaagcacaggcactgggtaaatatacccattacaaatgggagaaattagccaaaatgaaggggctacaggccccaagccagtccaaaatctatcagggcagtcaaatcttacagctctgaagttgtctcctttgactccatttctcacatccaggtaacactgatgcaagaggtgggttcccatggtcttggtaagctccacccctgtgggtttgcagggtagagcccctctcctggctgcttttacaggctggcattgagtgtctgcagcttttccaggcacgtggtgcaagctgttgatcgctctaccattgtggggtctggtggacagtggccctcttctcatagctccgctaggcagtgccccagtggggactctgtgttggggctccaaccccacatttcccttccacactgtcctagccgaggttctccatgaggtcttcattcctgcagcagacttctgcctggacatccaggagtttccatacatcctctgaaatctaggcagaggttcccaaacttcaattcttgaattctgtgtatccacagactcaacaccacgtggcagttgccaaagcttgggacttgctccctctgaagcaatggtccgaactgtaccttggccccttttatccatggctggagtggctgggacacaaggcaccaagtcctgatgccgcacacagtggtggggttgggggggggacctggtccacgaaaccatttttgcctcctagacctctgggtctgtgatgggaggagccgcaatgaaggtctctgacttgccctggagacattttccccattgtcttgcctattaacattgggctccttgttaaatatgcaaatttctacagccagcctctccagaaaatgggtttttcttttctactgcattgtcaggttgcaaatttttcaaacttttatgctctgtgacctcttgaatgctttgctgcttagaaatttcttctgtcagataccttaaatcatctctcaagttcaaagttccacagatctctaggtcagggtcaaaatgatgccagtctctttgttagtcatagcaagaatgacctttactccagttaccaataagttcttcatctccatctgagaccacctctgcctggacttcagtgttcgtatcactatcagcattttggtcaaaaccattcaacaagtctctaggaagttccaaacttttccacattttcctgtcttcttctgagcctcctaactgttccaacccctgcctattacccagttctaaagttgcttccacattttcaagtatctttatagcagtacctcactacctcagtaccactggtcttaactcctgcgctcaagcgatctgcttgcctccacccctaaagtgctgaaattacagacatggtccattgtgccgagccaaaattgatattttatgtatgacactctgggcagacctctatgaggtgacatttgaacagaaatctcaaggaaggggagaaattatccatttacatatttggggaaagagcattccaggtagaagaaacagaaaatccgtagtcttgaggaatgccgtgtatatgcagtatttttcaaacttgttattttgaaatacatatacacttacaggaagttgcaaaagtattaagaaagatcatgagtacccttcactcatcttcagctaatggttacatcttacataattatatgtaatatcaaagccaggaaaccaggaaattgatgttgatacaatctatgctttattcagatctcacatcttacatagctatgcacaatataaaaaccaggaaattgatattaacacaatctatgccttattcagatctcaccagcttttacatgcacttatctgtgtctgtcattctatgcaattttataccatgtttagagtcatataacaactacccctattttgatacatggtactgaatagttccagcgtcacaaaggaactatctcaagccaccctttaattgtcacacccatccaatctcccattctacttcctgaatcactagcaacccctaatctgttctccatctctatgattttgtcttttcaagggagttttctaagtaaactcatttggggaaagaaaggagatgaattgttctagccacggagtggagaacagagagtaagagtacctattgaagcagagggagtcattgcaataattcaaatgagaaataatggtgattctaaaccaggaagctttcagtgaaaacaatgagaggtacatggattctgggtatttttggaaggtagcactaccaggtttgctgatgaatggggtatggggtgggaaagaaagagaagagcccaggatgagtccaaggtggataaggtgaatagaattgagaaaatggtagaaggatcaagttagatggtagaggggtaaaggtggaagcaataattttgttttggaattgttaggtttgaaatcttgttagacatcccagtaaagtcacaaagagtgcagttggatgaaagtatgggattcagggaagaagtatgtgctagagatgcagatttgagagtcatctgtgtggaggtattattcaaattcaagtccccttggaatgaatggctattcaggcagggtcttcataaaaatgcttgttgcatgcctgtaatcccagcactttgggagtctgaggtgggtggaacacttgaggtcaggagtttgagaccagcctgatcaacttggtgaacccccatctctactaaaaatacaaaaaaaaaaaaagttagctgggcgttgtggcacatgcctgtaatcccaggtacttgggaggctgaggcaggagaattgagccaagattgtgccattgcattccagcctgggcaacaagagcaaaactccgcctcaaaaaaaaaaaaaaaaaaaaaaaaaagcttgttgcttcaaattcatgtcagtctgtaaaattatctgggaaggcagtacaaaaactgtcactttgactacgatgtttctggtgacccatcttcattgatcagtatggaaaaggcatgtctctgaaaatctctgagagtctttgatacagcaagaacataaggataaatcattcttctatgttcatggttgtagaggatcttgaatgtttaatggcagaatagccagatcacactctggcacttctgtatgagaggctgagggatgttactgattcaccccgagaaatatttactactaaggggacagaggcaaaggggatacaagacttcaccctgagctgtagcgctccctccttccctatcctgctttcattcttcacattgttttccttctttcttttttattattatactttaagttctgggatacacgtgcagaatgtacaggtttgttacataggtatacatttgccacggtggtttgctgcacccatcaacccgtcatctaggttttaagccccacatgcattaggtatttgtcctaatgctctccctcaccttttccctgtgtccacattgttttctttctttttgaagcctctcattcactaggtttcaatcctgccttgctagtgttctaactctaaggcctaggcaagttatttcaccgaacttagcctcagtgtcctcatctgcaaaatggatagttttatgatatcttcagcccttaaagtcaatggttctgacagctagggtgtactatcttcttggatatcagtcatctcaagcaagccctccttttttggaccttcttttcacacacttcacataccttagagaacataatacacatcctctttactcagggcttattctttataacaggcttcctaattcaattaactcaacttttcaaaaatattagtgactactgtgatgtaaataaatttgcattttataggggtcttagtaacccagaagggagtggggaaaattaatatatattgagagtttattaagtgctaggtactgtaaatattttcttgtatttaatcctccgagtaattctacaacaaagatattatcattgctattatgtaaataaaagaacaaagtagaaagaaacccacggtcttgtataagctcccctagttggtgggtattgaagggagtatttcaatctttggtagcttctgagtttttgttctctcagggaatctgccagatgtccagggcacctgccaaaccctatgaggctataagaaaaccattaagggtcttagattacccagctttttgggagttagaattctgaatgaaatttagtgttcctgcagctacaaaggaattgagttagggaagtgatgactttatctttagctacattggttattttccttataataatcctggcttggtagattagaggcagcccgagtaacccagaatcgctaaaatagaagtgcgagctcattgcccgctgtccttcactatgtttgcatataggaagcaagaataaaacaagcataaaataggctaactagcttgtcagagctcttcacaccaagtctttgtgagttccaataagacactgactattattaaaaagacagagactccacataagtaggaatttattgttttccttttcagtcaccaaaggacaatcctctgcataggttagcaaaaaatggtactgatcctataatctctaatattaaagtttagatttggcaagctgtacatcttatgttgttcattaacaaaaaacaatattgattggtatcttgtactataacttgtactgtgggtcaaattccaatacagcaaataccattgcaataacaattctacaaaactacatcaaaaaaacctttcatgtttgagccaacagcctgatagtgctaaggactttgagtacagtatgctagaagattcttaacagttatttgtcctggacaacaaaggttgactccattaaaaacatagccatcagtgtgggattatttccaaatcaagcttttggaaaagtcaaatgaaagtttgcaagcaggtggggcatggtggttcatgcctgtaatctcagcactttgggatgctgaggcaggcggatcacctgaggtcaggagttcgagaccagcctggccaacgtggtaaaacccccatctctactaaaaatacaaaaattagctggcttttgtggtgcatgcttgtaatcccagctactcaggagcctgaggcacgagaatcacttgaactcgggaggcagaggttgcagtgagccgggatcatgccactgcactccagcccacatgacagagtgagaccctgtcttcaaaaaagcaaaaaacaaacacgcaaacaaaaaaaaaaaaaaccaaagttggaatgcaataaatgttcattgaatgaatactgaatagggagtttcagctaatccactcaaaatagtgctgaatttccagctctaaggtcaatgcttggcatatatatcctgaaggaatgaatggacacagagtaattttttttctaaaatgcaaattcaattatgtcacttcccttcttaaaatccttcagtagcttcccgtagcctccagcatattattttgaatagtgcttctcaaactttgatgtgcatcagaatcacctggggattttcttaattaactgatgctgattcagtaggtctggggtattgtctgagattctgcatttctagcaagtgctcagggttatagcaatgattttggcctgcagaccatactttgggtagcaaagacataagccacttaacttgacataaaagactgtttagacccttagtttctctctcgctctttccccattttgagcttttgctccggttcatgtttttccctgaaaataccgtgatcttacattgtctgtctggatgctgaattttccctaattctgggcctccatgtagttttaggtttgacatcacaaccaccaaaagatttccccttctcccttaatcttggttaatgtcactctcatgtattatactgttaatgaagcattgaggacataaaacttatcaaatattttatcacaatcaatgatggcaccagtgataacatccaaatgcctgggtgagtaaataagaggagaataggggacttgttgttaaactaagtttgcagagaaaaaatgtactgattataattaaattggatgtttatttgttatgacaaaaaaggagctagagtcttttaatccaccccttggcaccactgcttatctccttgtaacatacgtttgattcccatgtctatttcttccatatgggaaatttcagctccctaaacatcaccaatacaacctgttgataagacaaagttaaatttattgcttactatggtaagaaagaccacagcctggacaaagctttggtagtatttcataaggagaaaggtgaggttggatttcattgggagtatgaagcttggtttaagattggtctttcactgtgggggcacaattaggattgggtaaggatcatggtattacaacttagtttggtggaaacagcacagtgaagatttctagccaagaggctcagagactattaaggtgtgaactctattgatgttttttgttgaagagttgatgggagtttggggaagttactttagtgaacagtcaaattatttgcctggccaagagttatctgtaataggaaagttatgctaatgaagacaatggaaaggtaaaccatgttaatgtcgacagccagctatgtgagcataaggggtaggtagctttggtcctccatgtccaaactgtttgtagtggtaagtgatcttcattctcacatagattgaaagcttcctgaggacagggcaatgtctttgtaaactttaaaatatctatgtcctgcacatcacctgccgtagacaagcatctagtaattgacggttgggtagatactgagggaaaacatgcaccaaataaaaatggcaataggacacaaattcactatcatttggaagaataacagtgttttccactgatatttgctacacacagtggggtccacagagcagcagtaccacttgggagcttattggaaatggagactctcaggcaccaccgcaggtccaatgaattaaactctgctttttttaaggtcatttgtattcaattattatttttttcttttttctttactttcgatgcatttttctttatttgtttttgagatggggtcttgctattttgccgagtctggtcacaaactcctgagctcaaatgatcctcccacctcagcctcctaagtagctgggatcacagatgtgagccaccacacctggcttgtatcacattaaattttgaggagcagtgctttaatatctattccattctcatcacttgatgaggtattattaattccacttatggatgtggaagttgaagccagaaagtttaaatgacttgtacaaggtcaaacagcttacaggtagttgagccaagaggctctcaagtcttctgcctccacaaacccctgttcagctgctgccctacaatggaataaaatatactaatcccagagggacaaatatgctaaaaatctcaatattatacactttggaaggtgcaggtgcattatctttcaattctaatttctctttcaagttttctgatgcataaaaatatgaacagcaggtctgagcaatgtttagatgccgtgctttgatccttttgccattcaagatgtttgatttgcattctgccaaggaatgtctggtaacctccatgatgcagaccacaccattagtcaagagagagctgacgtaccttcatctgagagctggctggctgtgagctgctcagagggaaaggatttctatttacaaattgtatcgattatttataaataaaagttccccttgctttcttcagttgtaaaatctgcagttagagagtcgggaagaagatcaaaactgcatacatttgcatctgccaagcctgataactagttccagaattacagaaatggtgctgaaatagcacctcaagtaccaggctctatcaaatttaatctatccataaggcaactgccaattatattttagagaaaaaatgtagactgaaaagatagacaatccaagtagcaactcctgtaaaattatatgcccataggagcaatcttgaagatataaatattggtatgtttctccttcatttatcatttatctgatcatttgacaagtatttattgaatgcctgttaagggtgtagatatatgtggtgaggctgcaggtgtaagtaggtctttctgaggatatgcatgaagttgatgttcataacttggagatgtgtgtatacagactgaggattccttcagtggatattaagaagtggagtaataggcagtaaagaatacactagtcagttgtggtacataaacacgtcagcaccacttaggtattaacttcctgttttgttttgtgtgtgcttaattacgctgtttattaaacaagcacatcataatctgcagatattgtcataaacagcacaataaagcctgccacatcagaatgtcatctatcaaattaggtgtgttcctcagctgtcccgataggcacacacctgtgcctgtaaataggcgcttggcggagattgcttccaggtgtggatctgttgggcgaccttgggatgtagggcactttggaaccttttcctctagcttcaggaattaacctctgggcttggttccatgccagcttgcattttgctttgggacagtaacatgtaaagaatatgcctgtgaatttagggttactgagaagtcctcatagaagaagtaaaatttccttgaggaatgggagtcttttattcaatccaggtttaatgcaaggcttggtgaacagctccagaaggttaataattgcgtgcgtgtgtgtgtgtgtgtgtgtgtgtgtgtgtgtgtgtatccttttgtcattcaaaagtatacgtatacacacacacctgtacagctgatgataaatatacattgtatcaatgagttcaaatgaagtgtgctattcattcactgaggaatgggctattataatgaactattatgatattagaaattgtcagggcaataagcaaataatacatacggttttcaacaaactttctaagtattgttatcagtgggtttgcttaaatctttttttacaaatttatttatttttttgagacgaagtctcgctctgtcgccaggctggagtgcagtggtgcaatctcggctcactgcaaccactgcctcccgggttcaaaagattctcctacctcagcctcccgagtagctgagattacaggtgtgcgtcaccatgcccatctaatttttgtatttttagtagagacgggttttcaccatgttggccaggacagtctcgatctcttgaccttgtgatccatctgcctcagcctcccaaagtgctgggtttacaggcgtgagccaccgtgcccaggcaatagccccattgctcagtgaatgaatagcacactttattttaactcattgatataatgtatatttatcatcagctatacaggtgtgtgtgtgtgtgtgtgtgtgtgtgtgtgtgtgtgtgtgtgttgaatgacaaaaggatacacacacacactcttattaaccctctggagctgttcagcaaaccttgcattttttactttcattacagtgtgtaaataatttagcaaattctaatttgaacctgatatcaattgagcatttaatatttagccaaatatttatcaagtgctgactgtgttctagatgctggggctgcaatttcgaaacagaccattgaggccctcatggagctcacaataaatgatcttccttaaagtatcaggtctctggtttgttaccgtattttttaaattgttaaggaaagaaaaaggccctatctttttgtagacaaacatgccctaagtgcttccagaaataatctccatcaggtaatgcagactgtgtgtggagtgaaattgagtccaatccatgatccagcagagtttcagcccaggatttctttagagcctttgctacacacaaagttggctgatgtgccattcagcatcccagcagctctttctcttcacactagcaatggcaaagctttgtgcggaggcattgctggctgctctgaactaaaagcatccgtggggaccgaaagaggtttttgcacaccttattaaggtaggcaagtgtgtctgagtgtgtgtgtgcctaaaagctggaagacatctgttgagaggaaagtgctcttctgtgggtctggcagcttttctgtaagtcttctattctgatgcaggagcgtgtgagcagtgggtgggaggagatgctttggtacttggaatgctgaggtccggattaagtggtattgtaatagctagttagaggcagaataaaaagctgggaatcaaagcatttaaaaatgcatccttccattatttgctctcaagttaaaccatattcattctaggggaaattaaaaaaaaaaaaaaaacacagcaagggcaagtagcccaaatctgtaaggtctttgagcttctctgttcgtccagcttttgaagtcttcctacagccaatttgtttggctcctctggagggggcaattcatatccacttccctctcctggagcatttctttcttctatactccatcagggaacaatagagtttaacagtaacaggcaattttttttttttttcaaagcttgtgccctcttctgcgtttaaaggtgttttttaagagactcctgctaggggaatcttggcgcctgtgtgttaagacggcaattaacttttagtatcagtgcttacattaaattttctctctttctgctttactaaagcagtcattaaaattcagtgtgagtaccatgaaactttatcataaaaccctgctttgcttagagaaccttgattgttttctgaaagcagccttctcagtttatatatacatagctgccttccttggaatatcaaattgctttgtgtcacattaagaaacactaggttgaacctctatactgtgttttatctgagaaaaatactactgcaaaaagtttgatttgttcaagttttaggatgaaaatttctttgtaacaagttatttgagttgcatactatgtcatcgtatatctctttagttcaagtaattttgcaattaacatacggttatgtaaagaagataatgatttattttttatttatatttttaaaagttattaagtgaggttttcctttcagtaagagtttagaaaaaatagccagaacaagtaactggacttggaagataaagatacctttgcacttctaaattttacctttgtacacttcggttgtgatttaatcattgaaatgcctctgctttgaagtaaatgcatcacttatggtgtatgctgtgttttaataaagggaaaacagttatgggttctctgttgcacatttgaatgttgttattttttgctgtatttaataacctcttttttctcttgtgaggtttactttggaaatgaggcatgttcaaaaataggctgacattcagcttctatgttttaaatttaaatgctgtctgtgttttatcacatctggaatgtgtggggagaaaagataccaagttttattatttagatttaattgtagaattgcagattgatatttttcaatgcattttcattatagtttctgccatggaggcagcgtgagggctttcaggaagatggagtggtgtaattaccaggtgcgcacgttcattaatccttcctggctagagaaagcttcaagttcttctccagtggcccattcgtaaagctataaatatctaaattgtgtcagccaagaagtcacacagaatggtggctctttttgagttcaatttcatgcactgttgctttggtcttgtgaggaaagctctgaattccttaggatagtcttggttgtgaagttccaaaaacaaaatatcaaatcattaaggatttaatttaaaatacatactcttctttcacaaactagatgattgcagtaatgtggattataaatttttttttttgctttatttctttagagctcctctttttattttgtatgatcaagattatagctgagattttggtgatttttttaaaaagatttatggcttatggtccatcagtctctccactacttcaaacctgtgtacccctgtatattatctgcagtactggaatgtttgcattgtatgtggaagctatatacgatttggtaaaaaataacacttaaaggtcttcgctaagagtgcttatttaatcattaaatatcccttaataaaaataattccagagatattgtctgtgtacaaacttaaaaaaagagaaatataaaatactgtgatgtgaataaaatgtatagcaatacactccaataataccattcttatgttttcccttgttctcaactgaaataactaagctaatagagacgtcagtaaggaatgtgttgtttcttcataatacaactacaaactcatctgataagaacaacctgagagtgaacgttaactttcctcattagaaagattcaatttaacacatatatacaaatacatttttaagataatgatatttgcagagtttttgtattctatggagtaaaggagaattatcacatattcaaagtaaaggtataaaatacatcttaatgttttacttaaattttaaagggtccaaaatatactaaaattgtttttctaattctttcctatgtttaaacgtgccagagtcattggaaataggacattctttttcttaagaagattttgcccaaaatatttaaaactattttcttttcccttgattttacaatttcaatattcatggatttttctactttaaaaataacagtagtttttatgatcttaaaacaaatgtttaagggcactttcgctctctggagactataccatccacatatttattatcagcaaaagaaagggcagggcatacttttatttgaagttgagtataaaaatgtgtctgtgtgtgagtgttattaaaaagataagtgaagagacaaatatagaatccaggaacattttcagcctggcttttactctctctaaaaatctaatgaaacccttgagcatctcttatctcaaggtacattaggaactgtccaacactatgatccgatgggagatcagtatattcatataaagaagaaaatttgttgttagtgaaagtcaagtcttttaaaaaaataatagttacagcatttgcaatatacaagcataatagatttactcaacgcccaccccccatctttaaaaaatcaatttccgacagttgtctactttaaaattgaacatatttgctacctggagggaacattgtaatgtagcccatatgtggtatgcatcctgaagaaaacctgaaattatagaggaagttatcctgccttctttcttctgttgaatgagttaaaatatattaacaatttgcctttcactttgtatttatcattttgtatctttgcatatttacatatacattcatgtgtacaagggcatatatactcacaggtcagggctatttaaacagctatttatttgaatatgccagggaaaatctccaagatataaagaagcagttattagatactatgtcagtatagaattaacagccatcttttttaagatggaagagaaaattaattaattacatacaatttctaacctcaagacattttctttctggagacaaggaatactgaggtgctcacgatagtgaagactcaacaagaccctaataaaatagatgaggataagtaaaactacaatagccaataaaaaacaaaaaacaataaaccatgtttcgctggcatgttggtgagtatctctgtaatatctgtcaataagggtctctgtagatttggagtaatgttcaggaactacctgtactagagaagacagtggagaggactccagtggctaaattctgctgcctttgcttccagaaatgtaaataataaggaggtattgtggcatttcctggaagcagtagtcttgtttcatggtctgactgtataagaatgcctagagaaacataacctcagctgactaaactcccttgatgattgtcactttgtcactgaactctgaccataccttttgcctccagaggcaaaagacgggtgaggaagtgatctcctcatctggtttttaaacaagtatataactagagaactggattatctcctaaacccactcttgtccctggaaaaaggggagtcatcctatccgtttcttagccaatttatgtatactcttagtttgagagcatgagaaggaaaactattttcttttcttaccttggctgggtttttaagaatttatttttagtttaatcaaaataatattttaaaaggtagtaagcctctcataagcagtttgatctgttctaaaataacttcaatttttctttttttaaactttcttttatcttacacacaaagtataatagtaatatgtactcactagaacaaatgaaacaggatggagtcacatagagaaatatatcatattctccctatcccctcccttaatattaacatttaggtgtcatgtgcttctccattaattttcattgcaaaggcctaaattttcttccaagagtgaggagtagcagcacggtagtttggacctgatatagctctctttccctagccttttgcttaagtgctttcctaggggctgactttacttacctaaagatgtttcaagcaagggctcacatttttggtagcagaagacacttactgattgctctcactaataattttgaaaggaatgtcaaaatctgggaggatcatgaaagaaatatcagaaatttcctttcagctgccattctccttaatactgttatcaataaattcagcatctcatatgtgatagcaaaaaaggtgctgccttttgttcttgcatcctgaggttcttacctaataccatggtagcaataaagatggtgagaaaattgcttcttctatggtgttcaggtcctgaacgagcaccctcacctccacagacggtggcaggtattcaagcattttacagactttggagttaaatatagcagtgttattctaatttaggtatgccaccaccagcggcaccggcaactgcaataggaaaaatgattggcaatgccagctatctgatgttttcatgtgccaggtgctgtcagttcttcacagtattacattccatcctcacaacaagagagtgccagtgagtgttgctgtgtgccagtgcccaggctaagggctttgaacacattaccctgttttatcctcataactttccacgttatttttattcctgaatgaagaaacaagttctctgtagagatgctgtcattgatccactcatatcctttcacatccgtttaacattttccctgctgtgcttttactcccaacaactagctccctaatcgctctgttggagggtggccttgaggctgccagagcctatttggtctgtgtaaagagagagatggatctatcctggaatttatgtccctgtgtgtgggaagcccttaatcaatgactgctggttgcagacacataaatacgtgagctttcttgttcccaactgagaaattcagaagtgtgaatggcactgccaccctgggcttttatgccatatatgtgtttggtctgtttcccttcccaatctcacttcattttcccttaccagtgtttcttgaaaacacatcccattagatcatttttgcatgaagcttcatctcagaacctccatttagggaacccaaactaagatattctctaaaatagaaactttattgataaagtttccaaactgtcttagtagatggccaatataagaccaagccaaatctttctgggtccaaattccctgtctttaattaatagactccattacaacacattcttcaatctttagtcagcaaacacttaccacgtgcctattttatggcatattatatttataccatagttaggatattatggttcatgaatattttatatctgtacacctgaaattctattgacctctctgggccacagttttgcatctgtaaaatcagcacaataatgctacttatctcatagagtagacttaaaaacgaatgaaatgatatatgccaagtgttgagaatcacaattggcaattactcatgctcattaaatattagctgtttttatgagtattgtttcattttcggtgcataatatcctatgcaaagaacaaaaggtattggtataggcattgaaacttgaagcatagaagaaaaagttaattaaccggtgccccactagatgcctctaactgctggctccgtgtatccctttagccttggctcgtcacgagaaaaccttggagacatttctgctggactcagcagatcaatttaagaaagatgaatgacatttttcttgaaatgtattcagtcatagctgcctttttctactttcatattttggagttcttagaaaaaattaaggactcctttttttaaagaaaatggtataaaagaaaatgcatatcactttgtcactttattattgtaacctcatcaaagtattcagtgtaaagacagtagccaagtgaactcttcttgtaatgctcggaaaccattttagcaatggtaaaattgctgcaatttatattcgtcaaattgcatgatttgacttattttagaaaagttattaacttctgaagagaatgcttcagaagcatttaaatgagtacaagttatcaccagtgatatacataaatttcatttcaaaatatacttctagaaactgtacttagttagctatagtatttgtacaaggattaattcctatttcattttgtaggaatttatttatgaatgtctatggcctgccagtgtaaagcagacttagagcatcatcttttacaataatctttttttttttaatcaaaggggagatattctggtaaaacaaaacaaaacaaaaacaatagtttattctgcatttttattaagtccctctgtaagtcatccctgaaatgggatatgtagagtcttatatttatttatttctcagaagcttattggaggtgatatgaaggattttaagaccctactaactaacaaaacaacaatttaaaattaattttcaaaataccttaacaaatcttattctccttattttcaaattctttaacaatgtttttcttattactaacataatatcttctgatgtagtcataataatatctaaaatgacaggtctaagtaacttacatggattaattgagtcttctaaatagtaaggtagatggcactattacttctatatgagaaatgaggaagtagaggtataaataagaaattttttggccgggtgcggtggctcacgcctgtaatcccagcactttgggaggccgaggcgggctgatcacgaggtcaggagatcgagaccatcctggcgaacacggtgaaaccccgtctctactaaaaatataaaaaattagcctggcgtggtagtgggtgcctgtagtcccagctactcgggaggctgaggcaggagaatggcgtgaacccgggaggtggaggttgcagtgagccgagatcgcgccactgcactccagcctgggtgacagagcgagactccatctcaaaaaaaaaaaaaaaaaagaagaaatttttttgagtgtatacagttagaaaatggcaaaatgggaattcagacccaaacagtaagactcaaggatacctttcttatcagtatgctaatatgaaaacctaagcatactagaaaatctaagtgccagttggaaaccagaattaacattttggtgtgtaactttctggctgctttttctatgctaacaaacatatatgacatacaaaaatacacacatacacaaattcctgttcactacttcttttatgttaacatcacaatgtaccgtacacagctgtattattttatatttgatttcatattttttctaaagtcagtgtatttgtcaaatatcaacttatctatttaataggaatatgggatgatctttgcttatacatacatacatatgtatataaaaacaaaatcaagtattttaagcgttcaccagaagtcatatgtcaatcagtaaagtatataattttttgctgccaatgacatatatcataaaaacgctacctatcatagaatgaaaatgaaacacagcaatattgggacacctattctcaagcaacagctttgtgatttattagctatctcacatgaaataactcattaacttggtattccaagcagcaaaagaaggatcacttaggtcacttgcaaaataatacaaagctaggtttaggggtgggttgcgcttggtgggatgtagatgaaaccatatgggcccttgagtttataattgctgggatctgcatggtgggtatatggatgtttattacagtatgctagtgagttaagaaagaagaggaattattattgacttacatcatagagtttatgcaaaaattaaacgataatttatttttaaactctagaggtataggtaccatcatgaagggacccacagaactgatgtagccagtaattattggagctggaacagatactctgctgtcagttgttctggttttgtggtcattgttcttgcctttgcaagttaccaactctaagaccttgggcaatactttaagtcttggttgtctcatctgtaaaatggggagagcagtaagtgtcttaaaggtttattctcatgttatatgacttacggtatgtaaaacatctgcgtttagacacatagagggtgcttaatggatgattgctctcattattaggctacatctaatctatgaatttaaaaactgtatagaaatatgtgacagattctttaagagccaaataccaactacagtgaaaaatacttaacacttgctgagctcttagtatgtgtcaggcttaactaccttaatgctcatagcaatcctataagataggtactcttgttatcctattttatatcttctaaaattgaagcaagggaagttaaataataggacaaagatcatacgctatctatccatatatacccatctggctgtctacctgtctccttccatccatccatccacttattcatctacccatccatccactcagttacttctctctctcccaccatccctttccctttccctctccctctccctgtctctgtcactctcctttacttatctatctatcgatggatcggtttatctatcatctatctatctctatcatctatgtatagttgttaataacactaacattttataaattacaagactgaaaaatgttttcattaacttatggtaacaaaagaccacattgtgaataaaaaaagcagtaaacacaggtctctgcacatatgaaagagatgtcctaaacaggaagagatgtcctaaacagtagggatacatagtatcatacaatcaaaacatggcagccctataaaacttacaaagcaatttcatgtaagttatttcatttgactcttaccacaatctatgaggttactatttttatttttctcattttacaggttaaatttaatatggcttccaataaaaaattagtatggttaataaatatcttgacgtcttgctcctataatcctaccgatagtttacagtaattagtaaaataaaataataggaaaaatacctttgatactagtattaaattataatcatatcattaggtaatttcaatttgtgattttcaagaatctgtaatatggtagcttcttcctactgacatgtttgaattcattttaaggcttataattcacaagtaatctatatattatctaaaatgtaaatgcacattcacatggagataataaattagcgtgaaatggctgtattttgctctctataatttttaacatacaggaaatcactgttgtctcaaaaatcaaggaaatatagtatttgaggtgaacttattctttctactattaacacattttaatatagttctctcacagtgcaacagagcaagaagctttcagacacatttgctgctgcaaggagcatgctgtgctgaacttaaaacaccttccctttcaaactccttgggactgtttttttccaagagacttcaaatgcactaaatttagcatccgttggaggcacacccaggcatattatagtgaaagccccaataactgaatgtgttaccactattcacaatgtttatgtgtgtatatgccttatctatgatgtattgcaaattacaaaaattgtgttattattcacagtaacaaaaacacttccagcaaatttctaacagtgatctcttttgaaataacttacatacatgtgtcatgggtcttaaactttgtcacttttatgtttccatcatgttgttttagccagtgagggttttgtttggttttcatttatgattatatactttcaaaaaatagatttcaaagtgtgaatttgattgattgattgactgattcattgagacggtgtttcactcttgttgcccaggctggggtgcaatggtgcgatctcggctcaccacaacctctaccacccaggttcaagcgattctcctgcctcagcctccctagtagctgggattacagatgtgcaccaccacgcctggctaattttttgtatttttagtagagacaggggttcaccatgttggccaggctggtctcgaactcctgacctcaggtgatccaccctcctcagcttcccaaagcactggaattccagacgtgagccaccgcgcccagcccgtgaattttatttttgaaagacaagaatgtccttgcctaattgcataatagtttaacatcatgaagactaaatatgctttttagccatgacaattttatttattattgttttcatttttaattttctcaaagatcctcatcagtgtactctttttggtcttccttataagcgtattttaacaggacataataataagataaatcccaactttttaaagttgtatccgtatgtattactttaaagtgctattaatataaacgaattagaggcaacttttattcaatcagattttaagtaattttaccaaaaatatggccttgataatgtctctgtaacaggttctctgtaatatacatgctgaggattggtttgtctttgcttttgatactattttaattagaaaagtaatggggaatccagacccttctcatttaataatccagagaaaaatcagtccatgttctaatagtttaaatttttctactaaaacccatgtgagaatccatatgagtggaatggagaggagttcagcttcaaagttggcagatttgagatgattctatggcaacagaaatgtgcttgagggaaatcagttgcggcatcttctataattgtgtcacctagattttgccttaggaatttctagatttccatagaacattgtgacctcaaatgctttatcttaataaagaaataaaagcagattagaagaattatttgcctacagtttgtgggagatgggcaagtcttaagagtttattaggtacccagaacgaaacatattttcttgggcctcataatcacattgaaatacaaggatttagttatacacagtgaccagttagtgaatgacagtcttcagtatctagtagacagtaaacatataaagatgtatttgtggccgggcacggtggctcacgcctgtaatcccagcactttgggaggccgaggcgggcggatcacgaggtcaggagaccgagaccatcctggctaacacggtgaaacctcgtctctactaaaaaatacaaaaaaaaaaaaattagccatgcgtggtggcgggcgcctgtggtcccagctactcgggaggttaaggcaggagaatggcgtgaacccgggaggcggagcttgcagtgagcagaggtcaggccactgcactccagcctgggcgacagagggagactccatctcaaaaagaaaaaaaaaaaaaatgtatttttacttttaactacagcgagagaccctggcagcctacagcatacaattagtgttcattatttagattgcatggatttaatgtgaggggtcaattacttgtctaaccagtgagcctagcctcttgctcaatactgcctgcttcatgagggtgaactgtgctggagaaatatattacaggattatctgcagattttttttaaatgagtggttaagtcaaaagttcttgtgaaaattcagagtaataaattattatgaagttgtgtaactaggtaaaggatagtttcttttacacgggtaaagattaacatgaggaggaaaactttagcaatggcatttaattccattcaatatatttatattgagctcctttaaaaatacagggccttgtggtgggtgctgaggacagaacaaaaaccaagtaatacatgaacataacccttgatttcatgatctagtagacctataaaagttgtcgatatctgatgaaaagaaaatggtaaagatattccaaacagtgtatgcaaatccagagataggatggaggggctctacctgaaggatgatgataagaaaaccgtgttgagtgaagggtgatttgtggaattcagataaaatatcagtcttgaatgctgagtgaatactcaatgattgactagatcccatggacagtaatttcttcaattatgacgatgctagtgtttatgactataactatcattctccatgccaggcactttgccatttggtaaatgtatagtgtgctattctaacaagcatgcacagagcttttactttaatgtatccatgagtttattggggttcagaatttaggtaagctttgcaaggtcgtagcatggagtaaaatatctgaaattcagacccatatctaactaagttcaaagactgtacagatatttctcctcctttgtgcagagaaggataggaatggttccatattatcatggacttagtcagatgttttaaaattataatgtcctgtgttaatgaagaagggatgatattcagtgcatattcttaaccgttactttgcttaatgctctcgacttttctgtgagatggatagtgtagataaaatccccaaggggactcagcaagtgcaagtaaaacaatgaaactttaaagccctttgtcaaaacctctctttttctcagaggatggaagggccgtaaaggttggtgaggaaggatggaccatttcctatgtagtcttctgacaatattcaaacaaaaggagagtcagcaaatcccccttgatgtgggaagttttaatacaatttgcagagtgtctctctggagtagacatcctcctctgcaatcgtgtcttctatatagcctcagggctttgggtaggtaatcctctccaaggagagtcctggagagggctgtctaccccccttgcaccatcctctaacattattctatagctcagctccttgtttctgtttcctgccttgtttttgtctgagtctgcaattatgatgtaagcaccatgaaggaaggtatgttgccagtgtttgcatcagcatatcccccgtgtgtagcagcgcaagggatatagtgagccctcaatgtctatttgtagaaaaaagaatgaacgtatcaacgaaatctgatacatattcattgtgtctgttatctccatctctcttgtcctgccttgttatcttgccattttcacaaaaggccccaaggcccatcatttcttgtgtaacttccagagtgttaatttttaaattaaaattaaggctttctacatgagtgtctattatttgagaaaccatgcaagatcgtgtgtgtgtgtgtgtgtgtgtgtgtgtgtgtgtgtgtgtgtgtgttgcactctatattatattgaattctggattttttcttataaataaaattttaaaaatagttctttaaaaataggaataagatgttttaggaggcacagagagcaaaggagaataaaaattgcaggtttggggttgtgcatactaattgccattgagtaaagagagcacactgaggccatttagaagagaattaacgtgttttgtttttgtttttgtttttgtttttgtttttgtttttgttttgagacggagtctcgctctgtcacccaggctgaagtgcagtggtatgatctcggctcactgcaacctccacctcccgggttcaagtgattcttgtgcctcggcctcccaagcagctgggattagaggcgcccacaaccacgccaggctatttgttttttttttttgtatttttagtagagacggggtttcaccatgttggccaggctggtctcgaactcctagcctcaagtcatccacccgactcagcctcccaaagtgttgggattataggtgtgatccactgcacctgaccttatttttattcatttaaaaatattaaatgttactgcatagggagtaatgggcttaacaatgaggtgaccaaaactcctatgtaccatgcagagcaatgtatcaaatgtttttaactataaacttctcaaaaacataaacctaattgttctgcagctgcaggttatatctgccttgtttgagcaaaatttggtggtgaaaatgccttgcttccatttttccttcaataactgatatggtttggctgtgtccccacccaaatctcatcttgaattctactcccataattcctacttgttgtgggagggatccagtgggaggtcatttgaatcatgggggcggtttcccccatactgttctcatggtactgaataagtctcacgagatctgttggttttatcaggggtttctgctcttgcgtctccacattttctcttctgcttccatgtaagaagtgcctttcacctcccaccatgattctgaggcctccccagtcatgtggaactataagttcaattaaactactttttcttcccagtctcaagtatgtctttatcacagcatgaaaacggactaatacaataacctatataattttgaaaagtacttgtctaatagactttcacaatagaaactatatccttatcaactttgaaaagtcattgcttaatgcctttggataactgaattttctaagattattttaattttgaaagttaaattttatcccagtgttgacgatttttgtatgctacttttaaaatattttgtcagtgatttatatctatggtgcaatcttgtaaaaaattaacaatgcaaatgtggctagaccatttaaaaatcaatatgttataattcagcccatttaatcactttagttaaacatcttaggaacaactcagttccatttgagagaagacacagttttctagatgtgtgttgtggcatcatattgctttacaatatcttacataaggtgaattcaaatcatatcattgaatctgttttaaattctgtcatagcttaagattagtgactaaatattggcaggtttatggaagtaggatgtaaacaagacaaaaacaagggtggaacaagtaattttagtatattattcacttgcacagagaaaagtcattcacaccttcttcagctttgtgaagaaaatagactaaaatcctgttgatatagcaactatgttttccgtttcttgtataaaaataaagaaaacttcctattaggaattagccagacattttaattttctctcttctttctctattttcccttacagtctctttgaaggcaggcaaaatttctataaagttttaagaatgttttaagatttttttattgtgaaatattcatagactcacaaggagttgcaaaaacagtacagagatttcctgtgtatacataacccaactttccccagttacatattaaccaaatacagtatattaccaaacccaataaactgacattggcacagtgcaatcaactagactgtagaccttacttggatttcacctgtttttgcacatgctcttttactgtgagtcattatctgttattctatgacattaaccatgtctatagatttatatagttactaccactatcaagataaagaagtgtttcatcaccacaaagtaacttaaaggattatttttataaagtaatgacaaatgtgtcaaaagccattcctgtgttatatagcaagtatgttttgagttattaaaactcactgatcatgtctttcagtgtcataactttgggtttccctccctaactataataatcctgatgaattacagttgatgaatatgagaatatccaactcttcctgactctataaatatattgactgagattgtaatatttatggtgtcttaaggggcgcttgttttattatgatgatgtgaacatgttgagaatagtaagaacagcccagtttagcaaacaggatatgagtcttctatatccagctcaatcgttgccccaacaggggacatctgcctttgctacttaattttccattctggaaaatgtgaagtgtatgagaatgaataatcgtctccgattttccagcacataataatctgaggagagcaggtacagcaatttaggagctgttttcttttggtttccaaaaaaagttccgtccagtggtctaagttagtcgtttactaagtgatagagcaattggctatgctttttgaacggactgataattatgtggatgcagcaaataggatatagacaatgcatctactccattacagtaaaaaagactctgatagcagttaatccacataccaggcacttagcttaggcacagttggaggaaatggaatggtaatagactgtagtatggcatgacaggagctgtagcttgagattcagaattccaactctgcctctcaatatttgagtcctcatggccaagatatgtaaagtgctctgtgcaggtcttggcaaccatccaccacacacttagtatgcaatatctatctttattagtcaaggatctggaaagctagttgatgagacaaatgatagaaacaagagttcattagatgaaataaagtaataaatgatgcaagaatttaaaaaagatttagagaaggaaagggaacagaactcacatgcaagtagagcaactgtgtatcagataatgtgctagctgagttagaaaccatgtctcatattaccctgaaaataattctgcaaagctgtaggtgttatttttttcatttgacaggtgaattcatgaaggcttgaatatagggttaagtgagttgtttcaatgtagttattgattcaaatcaagatctgaatgactctaaatatggtgctatagagatttgaagtaggataaataggatttgaaaaaaagaaaaaatatatagggaaaggaattggtacactgtagcagtgtcataaatgaagcttcagttgtgtgattccagatgatgtatgtgaggcctaatcaaacagctttgtggaatcaaaatttctgctcttgtctccaactggggacgagttggctcgggattaaggtgggcgaccttgggaagactagagtctaagcaggactttagtccctcataagaattatatgaggatgtatatttgcatacaaattcctgggcccaccgagatctgccaaattggaatgtgtggtgatatcacccagggaaacatagagagctgttataattagtcatgaaatatttagtactgaaattatagattatgttaaataatcacttataggggacatagcagggttggcaggttaaccatacagcaaacagggttgtaagtcagggcctagagaattttcaagaggcaggaattctgcagaatgaaggcctggtctcatgcagcaccatggacagctccgaggcactcttgtttctccaaaaacctgaaatcaaaaactttgcttttcatcatgcaacatacccatgtaacaatcctgcataggtactccctagtccaaaattaaagttgaaaaaaaaaactatactttcatttgaatacagttctcttcggctttaccagctctactctggaaggaatatcttttactcaatgaaaggccatcccctgttaatgcctggccaggttctccttatcagtcattcactatctttgtgtgtgagtgactaaacatataatgctatgtttagtggatggagtaagattacctttgcagaggttgtactggcttacccctttggttcttgtagttttcttctattagagttttttccatccctaggtttctatactgttcaaatgggtttaagattcttgaaggtattcctctgaccttgtaatttatgcttgtctcctagcacaacttttttttgtaaaggaggcaccaactatgtggtttgctggcgatggcatacacaaatcaggtgggaggaattaatgagagcagcaattccaatatctggttcttcaagattaacttgtatagtttaattcagcattctaaataagcctcatagatttaaaaatctagaataaacccacatttttaaaaaaagttttatgttatctgtgctgataatgcacgctgtacataataaaatattattttcttttttttaaatttattattatactttaagttttagggcacatgtgcacaatgtgcaggttagttacatatgtatacatgtgccatgctggtgcgctgcacccactaactcgtcatctagcttaaggtaaatctcccaatgctatccctcccccttccccccaccccacagcagtccccagagtgtgatattccccttcctgtgtccatgtgttctcattgttcaattcccaatattattttctaagtggcagtggaagaaacatggaaagttctacttcatccatcggtggattagaatttgtataccatgagatgattaattttcaaaaccagtttgaatctcacaaaataatgaccctgttttttgaaggacaaggcagaacaaggaactaggctgtgccacgttcaagtcacaatctctaacatttgttttgttttgttttgttttgttttgttttgttttgttttgtttaatctctgttgcttgttcactttctcttgtaatctgcattgatttgctacctggctatttgtagattgacttcggctgccaggaatggaatgtttttcataaaggaacatatgccttaatgaaagtaccataagaagggagtagagtgtgaccaattgcctaggtaataagtagtgacaacaatgatattattctagtataaatggaatcagtttttctttgcccagggggcatgataaagaaggcctggctggtatatactaggtgggacacaccaacagtgcctagaatgtcaatggatcaaacctgagggaaccagaagttgaaaagacatatcccaaaagaaagcatttgatgtttaagggttggcttacttagaacacaatgaaaaatattactaaaattaaaactatgattttagctatttttaaatatgacaaattaaatagcagaacattttaataaaacattacttaaggtccacaattttctgtaagtctaatacatgggtcattaaaataaaaaattccccatgatttatggaatcagatttttttaatacaacgaattctaaatggttttataatgccaattccaattaatatcctaattataacatgtcatccagaagggttaatgactaaattttattaatatttgttttctatttattttgatttgtgcagtttatgtgtatagtaacgatagctgcaaattagataccattagcattaaataaggtatatattttaatagaaaattaaagttaagtatttgagctagcctaaaatattcaacaacttaaatttgttttttgtggatcacatttttttgagacaaagtcttgctctgctgcccaggcttgagtgcagtggtgcattcatggctcactgcctcaaccatccaggctcaggtgatcctcccacctcagcctcccgggtagctgaggctactggcgcacgccaccatgcccagctaattttttgtatttttttttagagatggtgtttcaccatctggtctcaaactcctgagctcaagcaatctgcccaccttggcctcccaaaatgccgagattacaggcgtgatccagtgcactcacccctgtgaaccaccattaaatagctaataaaagatgcatgtcaataaaaataaacaacttactagaatgattatgtgaaaatcatttattcttccaaagcatgaattttcaaacacaccttttgttactgttttaagaagggaatcatttccatatatttgcatgtaaatcacttttagtctcagagaactttccataaaagtttttttattactgctgtaaccgatagagctagtggactattaatttaaaaagctgtacataaaaacacatctatagctcaaataatctaggataccttttagtttggggaaatgtagatgaaaatgaagtaattacagaatccttgttaattttcagatttagacagtctaggcaatatctttcaggaatgaagagatatgtgttttttggcatcttggtagagtatattcccattgtaattcttttgtgaagtctagaccagatgtggccataaaaatagacccctactacaataatatatttcatagataatccaataaagtcaaatcttattgcagtaggcttagaactctgtttgcacccatggaatttatatcagtttttggcaaatcctttcatctctgaggatactttttcatctcacatataccctattttctgaacattttgccttcaaagtatacctcatttatcaagaatttctctttattcatctgacttatacaagtggcaataacaacgtctggttcccatgaagtaaccagtgaccctttgaaataatatagcgctggaagaaagaaaaggaaagggagactgatcattcagcaactctttaaaaccatgtcaccgttaaacacatagtttattttatcttttttttagaattgtgaaaacctatattagcatcttcacggatgtctcctttgtttacatccccgcttctgtgccttgcctgcagtagaaaaaaaaaggacatgtgtatccctattccccattgtcttctcattctacatgagaatgagaattcttttaatttcttctctatctacatgaacccacttccattatctgtttgttcagttctttaaatgccctgaagctagctctgtgactgggcagttgaaagttctggacttagcatcaggttaatttgaaaaatacttattgagccaccaccatatgtcagccactactgtagatgttttgaatgtgtcagtgaacaaagcagaaaagatgtatgccctctggattcttgggggtctcaaatagtgaaagacagatacgataagtatattgtatagtatgttcaaaagtgataagtgctgtgaaaaaaaagaagaagggtaaaataagagatggctcatgctggagtacattccaattttaaatagggtatcatggtattcttcattgagaaggtgacatttgagcaaagatctcaaagaatgaggcatggggttgaatcatgtagatatcagcagtaaactcattttgggttcagtaaacagtcaatgcagaattcctaagccatcggtttatctgctgtttggggctggttatctgcagtgtggctagagtgaagtaagtgagagaggtttaggagagaatgttagtgaggtgagggtggacctttgaagccattgtaaggacgtttttctctttctaagtgtgagaagatgatgctgactgagaccagggtgataagaaatagtcatattctgaacgtgtttggaagtggggccaacaaggatttctggatgaattggataaggggcatgggagaaaaatggagtcatgaatggctccaacgtttttgctctgattaactggaagggataaagttgccctaaactgaaataataaagactatagatagaatggggcgattagggaggcattaaatttggatatctgttagacatatcaccagatatattgaataggcaattgaataaatacctttagagttcagcaaaaaaggtccaggttggacgtttaaatttcggaggtgtttgtataagataacatttaaagctgtgatatcagattgtatcactaaggaagaatatagatagaaatgacaacgtgactaaggactctaacattaagaggtggattgacaaaggagaaaacagcacaggataatgaaaaggaatgatcagccaggcatggtggctcacacctgtaatcctagtactttgggaggccgaggcgggcagatcacgaggtcaggagttggagaccagcctggccaacatggtgaaaccccatctctactaaaaatacaaaattagctgggtgtggtggcacacacctgtagtcccagctgctctggaggctgaggcagaagaattgcttgtacctaggagacagaggttgcagtgagccaaaagattgtgccactgcgctccaacctgggcgatggagcgagacttcatctaaaaaaaaaaaaaaaaaaaaaaaaaaaaaaaagaaaagaaaaggagtgatcaatgagatgggaagaaaaacaaaagtgtgtggtgtcctcaaaaactgacgttctattttcaaaacctacattttgggtctccttttactatatcctgactttctagctatataaccaaaaggagaaagcagtaatttttttagatataacatgttaataactctaagggtattcaatgaatctgaataattcagtggtataatgtgaaaaaatatagtattcataggaaaaggaacagaagttagctcaggaaatgacttgaatgaacaccgaagccaaatctccagcgcaggtccacgtattatttgtctcagtggttgaattagcagcaagattccttagtaggatgaaaaaagatgttgtgagcatctgtatctacatgactgaattaaattcctccaacaatgaaatgtagttaacgtagtatctcgaaaagaaccctaagtggaattcagggaacctaaattccaaccatggttttgctgctgactgattgcattcacttcaaatctatcattaacctccttgtgcctcattatcctcatttcaccaaataagaaaaatgaaatattcctccttccctacctcactaggatgttgtggatttaaatgtgtgagaagtgcttgagatgcataaaatttgatggagtgttttattcatgaattcaaggcatctgaagtaatttgaccatgatggacagttgcttccttgcacattttttagagtgacatttccgttactgacccacccatttatgcaacatgttgcctaatctaaatttaggtcaaaacaaattgaccttataggtaagcattatatctattaatattgtatttttgtattattttataatattcatcattcacctattttctcatgcaatatatgttactgaacacatatagattaaaaagccttcatccctaaataacaatgatgggaccttccatttttatatccctctggcatttaaaatgtgcttttatagccatcatctccattgatctctcagtcccttgaggttgatatgacagatatgctttttccattttaaaattacggaactgacagtctcagatgactttaccctccaactactgtgtgaagaagcagggtctggcactgaggtcttctgacatccagtgtagagcactatacttcacaatatggccattggcttactttattacaagcactaaatattttccactgaatacgtaatacctagaggagaatgtcgtgtaaaacagcagcagtagaacagaggattaaatgacccattttcttgaagttatcttagttttaaagggttttttcttcatcactaatgaccatccctgactaagaaattattctcataatacatgataatatctgcgttttccaatgcgacaagaatgttaggatgtctatacatgatcttgacaatccctagctccatcacaatgtgtccaaattcattttatttggctagacaggcatgtagtcttactttcaatggttggctctgctggatgctatgtgatctagaacctgtcacttaccccttctaaacttcaggaattttttatccttaagataacaagaaaactcgtacctgtttcaaagagctgtttgttcaatcacctatccattgattatcttctatatgccaaatgtttttctaggtgctgaattacaggaatgaatcagaagcaaaaagttcttactctcaaggatcttatatgctaatgaaatagatgttaaaaaataacaatttttgtttcattttattttattttattttgttgagacagagtctcactctgtcacccaggctggagtgcagtggcacagtctctgctcactgcaacctctgcctcccgggttcaaatgattctcctgcctcagcctaccgagtagctgggattacaggcatgcgccaccatgcctggctaatttttgtatttttagtagagatggggtttcaccatattggccaggctgttctcgagctcctgacctcaggtgatctgccctccacggcctcccaaagtgctgggattacgggcatgagccagcgcacctggcattaaaaagtaataacaatttttaaatatcaatatgtcttatacagaaaagtgagcagtgtggtagagtgtaactggaatgtgagttgagacataacaccagacagagaagccagagaaggacttttgtttgaggaaatgacatttgaaaaggaacctgaatagtgacagaggcagatacctaaagaatatgttccagacaaaggaaacaaaaagcgtgcaattgcatagtcaacttagcctacttgaggaaaagtgtgagtggattttggtgatggagaggtaagtgccaggagatgaagggagagatctggcatgcatcagatgatgtgcagtcttccgggacgttgtaaagagttgggctttttttgtttataaattaaatgttaagccattggggtttttaaccagaggagttatgtgatatgatctatagttaaattatgtttgttcttggatggagtgtgcattatgggaatttatacagaaacaagatttcacatatatatatatataaaactcagtgtcaatagaaaataataaaaacaaattttatccattgataattctggcattgatagtagtgggtatggtggtaataattgtgtgtaacactcaaactttctgaaaacctacacttgatctgtaaatccaaaagtatatgtagcaaaagccataatctgctcttatttctgcaccacttgcaccagtgtggagtgataaggcaaattattcaggcacctgtgtaagccttcagtgtcctcacccccttgttataactctccactaatattacattggtaaagacgtccctgacctatatgtcactgagacctcaaagaaaagagcaaagctaaagcgtaagggggaaaaaagccagcttaaaaagacttaaaggtttctgggaccaaaaaaaaaaaaaaaaagtctttgaaaaatgagaaaggaaggatagaagaaaagattctcctttggtcaatctggccaacctttggaaataaaaagtattgtgttgcagctaataactatttgtcactgcaggcacttgctgatgtctgccctttaaaatgacccaaactcgttggcctcgaaatcagaagccaaggaaaaaatcttggacataatgttttctgtagaattaccaattttctctctctctctctctctctctctctccctccctctctctctctctctccatatctatatatatatagatgtatatatattttttctgtaggaactaccaattcctatctatagggactgattgagaagtcccttatagcagtttttctttggcttttaggatgcaatgattattggtgagaataactctttcatttcacatttgtcattggcttatttgaatgtaatcctgattcaatcgttatgatctcctttaagtaggaagagaagctggtattacattgtaggattttaattttgtactcatgaaacttttgaaaaacattactcatactcttctgactgtcaaattggcctctaagaggtccacatctcaagaggtatcaagcattggtaactattttttggtgttgttttctcatcataaaatgtacttttattaggtgactttggaaattttattgaatcaatgcatgacactgcctcattctagtaatctgatgaagcaaagctgaaaaacaaaatttgaggattgtcagtatatatacttttatttgcagtcaagagttatgctgcaaaaatggtttattgaagtaacaaaattttagctgatatattaatctgaaagatacagtatacatttttagtatggaaaagatgaggaaaaggaggttctctttcctctaggtatctagagcaaactgtaactgtccttggtatttaatttttggctaaggtactgagattagaggtggggccttagatatgattaattgtcagactgataagctagatatttcattgagtttctgttgtgctctttctttcagatcctctgttcgatgctttgttataaagatttgggcatttcaaaatcttctccatatctggtgtctttccaaacagcaggtcatagactttacacaaagaggaacgacacaggttataagtagaagtgttttaaaccctgagttcctatttcagttttgctttcttaaacatattttccttatgtgataaatgcgagtgttgaatggtgataaataccacccataggctttaaagcctaaatgttgaatttgacactgagagtttaaaggcatcatgaaaatttctccagaactaatgttcaagcaatttaggttttacaggcaactcaatagttttgaatgatgtagttattttgaaaaagtcaccataaaacgctatgtttagggaattggtactttgcatttatcagaagattgtaaatgtcaatcgattggcttgctatttggaatataattttttaaattatagttcaaatcattaggatttaattcatgattttgtactacaaactaaatctatgaaaaatatcagatatttattttaaattagaggcatgtaaaggaaaatataaattttgaaatgccattttactggatttttctcttcagcccaccctaggcatttgttacataaaatatttctgaggaagtcttccactgattttgtaaacaaacatgttttattgaacagttctttgttgactagattaacattgaccattgtatgcaatgcattctcaaaatcttagaagctggttttctttttaatcatataattttacttgttttacagtgaaattaatgcatgtaaaaagtatacctatatagaaagttaaaagaatattgctaactagttactatacttccaaattgcctattttctgtgtcttgcattggacagtagtgattacctctaaaagaaaatggatggtctttgtttcattgaagggatggataatggacataactggcattcttgagcaatgcaattgcaaatacatgtctttgcatttatggtccaatcatcttcttactatgatagcatataattgaaggttcaaataaatgcctcgtcccttcctgtggcatattaaagagaaagaaaaattagaaatactttcaaagctacctcacatactaatggtagagttgtttgagtatttaggtgatttaacaaagctgatgtattttattatgcttgatcattgaggaaaatttatttatcggaatgcttttgagagcatatatattgtcagagataaacacagctggatattaaagaggtaaaaacagattttattcaatacctcgtgaaattaggggagagctgagatccattctaatttgtgcagaggcgacttggttgttttaaggcaagaaggagggagaaggagtgggggttcattcgagttagagaagtaaaaaagtacaaagggctggacagtgtaaatgtgattaggccagctgtgttagctggaagttattgaagttaggattctatcttcccacagagaacaggagacagaggacttatccttcttgatgatgtcatttgaaaagaatggctttcaggtccttgagtgagagacacttctgatttccaagagctacatgttcacaattgtaagcccttttgagtaaatgttctaagaaacggaggtaagagtcctatcaacagatgtgtgttggctagaacaaacattaaattttcctggcagcactgagctttctcaagcaggcacttaagggaaggctagggtcatcctagggacatggccttctggggctagaaaccatactagagtttagtcaagtcttagtgcaagggtttggacagagttgttaagtgctgagagttctgtatttctcactgtcacaaaggaagatcagaagctcctgatacttttttcatcagtacaattgaatatataaatcctatacacaaaaataaactaagcttatacaagcatattggtcaaggaatgttgctggccttattaattagatagcccagttaaaagaagaattttttaatataattaatgttaaagtaggatgatagtatataaaacgtgtctactgtcctgaatacaaactaaactgtttggtttagcatttacctcaagatctcttaatatcccccaaagggtccctaaaaccacaacttatctttgtgctcatgaagtagagaagagacagttaatagacatttctagctgatagactgttgtagagcagagaacgctctgtgtttttgaaaattaaacatatgaatttgcccctcttcccctattaaggaagaagagtttcttaattgtgcgaacacatcaagtgaactattcaattagatttttgtgacccagggtataaacatctggttaaggttacatatttcaaaggaacaaaacactagaaactcttggttttaaatctcatggctggaggataatttgcagcagagatttatctggcaagcatacagaattgctgagactgttctaaagatgtaagtgtgggtgtttgtgtcgtgaaaatagctgtttacatctattaagtggataccgatggttgaaagtgccgtctatgtcaagtttttaccaaatcaacttttgcctcactgtgtcagaccattttacctaatcaacttggactgctaatgtcctttcccctggcaccactatctgtctcttttgcaaagcacagaaacggcatgcatgattgtagtttataaaacacatgtaccaatgtggtctacagcttctgttgagttcgagagggtcagtttctgtaatctcttctggcacagagtcaagaacagcttcactttcctcctgctacctctctacccgtaagtgtgaacccatcactttgctaacactcaggaaggggattacacaaaatagagcaggagccctctgacctgaatatgcatctgagccctagccatagagcttctgattcagtagatctgggatggggcctaaatatttgcatttttaagtgtataagtgatgctgatgctgctggttccaggaccacattttaagaaatatcgataaaggtggagaattaaactgcagctcagaagacctgagttcttgccccagcttgacttttacaatctagcaaatggataaaactcgcaggacttcagttctcttcatctacacagtgagtggttagattggctttgtaatttaaaattaaacagggtttgattctgattcactacacaaggttccaaagaaggaatgatatctcctttcatttcttcactttgtcttctgtccctaggtaatcttatctatgttcctgatttaacctaactaatgtttctgcaaagcttctaatatttacatctccagccctgaaactctcatttgaatgctagtcttatatacatacccccctgcctaattgacatctccacttaaatgtatcagaggcaactcagactcaacaaggaccaaactgaatgttcgaccttgtccttcaaacccgatacacatccaggttcctccatcccagtgaatgacactatccagttaagcaagccaaaagtctggattttttttcctcactcttcctcactgtccgtcaactaccattattaaatctgtcacctggtcctactgatttaaccttctcaatatctctacagtttttctttatgcccattagtatcctagtgcaagctaccatcgtctctcattggaattaacacagtaacccccctacccaccagactgttctgcctacagatagtgtgatatttaataaatataaatctagccttggctagatttctccttcaaaaggttcacattaattttagccttaaaatggtgtgcaaagctttgcatagtctgtcctttgctatgttggcagtattttttactatccctctcatctgctcattctctgtactccaactacactaactttgtttttttttttttttagatttctctaactacagtgctgtaatctctttttcctttgcacgtactattccgtttgtcagggaatctgctcactgtctccacccactccacacactcacgttttcctgcccgtcttaccggtcttgatcggttgtcacttgctcaggaaggtttccctggtcaccccctccacaaattgaattaagtcctcttgctgcatgctgtcctagtgctctttattttcctctcctcatccttaattcagtttgtaattacatgttatttgtgtgaggatttgattattatctgtgtcacccactagatattgggcattctttacttactcaccactgaattcatagaaccacagtaattgtacacaacaaatattcaagagaaatttattgaattgatgaatgaaaagttgtaccttaacatgttcctgacatgtatccaaaaaagagctcccctttggggtctattaggactttggacctaggtaaacgtaaccctagtttcgctcaggtttaaacagtagaaagtaattgggtctcttttgcatgtggctttcctaagggctaaccctgtcttcggaatgagtcaatacagcagagctgttgaaagcagactctagcttcggacaacgttggtccgaatcatggttccgtcatttcttagctgtgtgatttagaataaattaatgttttaaagctttgatttcctcttccttaatctggagatgctaataaagccaacttcgtagaggtattgcgatgagtaaataagcataatttgctgtaaacaccttgcagattgcctgttgtatgctaactaatcaataaattgaagctcttaacatcattatattagatatttccagcattgagtatactatcaggcatgtggtagaagctcaatataaagttttgttaaattgaatagattccatatatggtatttctacagcattatgctccttatttaagtgtctctaagtattttttaagtatcacctcacaaaagacagatgtttaattcattacacatgtgaattgttttagatagaaaataaaataaaaaattcaaacattgaaatcaatagtgtaccttaccttaggattacaccataaaatttctaccaatcgagaataaagtgtacagtctatttcctttctaatacttttaacgcaacaaatgtttattgaacacttactacttctaatctatgacagacataaagatgaataaagcatgccacaatgtttaaaggagctcactatatcataagaaagcggattcacacagacaactctataagataaagtggtaaatttaggctggcctgtgaaacaaaggattataggtatagttaagaggtggaatttattttacttcgaggatttcagttacctttatattctttgtctaacctttcatgtttctctttcttcagaaacagagcacctttttcctgacacattcatttccccctatggagtagagcagttgttttcaaagtgtgggtcccagatcagcatcacggggatggttagaaatgcccattcttgagcctcacaacagacctactgaaacagaaattcttggagagtggagcccgcagatctgtgatcaagccctgtaggcaattctaacgcacactcaagttaaagaaccacgggaagaaaggtccatcctgtaacaagacagatttttttcattagcatcaattttgatcatttatatatatatatatatatatatatatatatatatatatatgcatgctcacaaaaccattcaccttactaggttttagtattccccttcctgtattcatgtggtatgtatgtatacaagatgaacacacatttacctgagacaaggtaagactacacatgtctcatttggggaccagaggctgtaatcttactcaaggtcaaagcgtcttcactgctttctttcactgcttttcaaaagtaaaatttccatgtaggtgtcatttgttttctttttgtgttttagaaaaccgattaaggggtgaagtctggctaaacttagtgtcaggacatttacttagataaaattattttaatttatcttgtaatgttcaatgtgagaagaaaagtccttatgagtagtgtattccttaaataacaacaatttaaaaactaccactgaagtctgtcagagtagttttgcctcatttgtctagataagagaaaaaaggttcacattagggattgcaatttgtctgccaaagtgcagtttatttattcagaaacatttagagaggaatgtgtcagttctgttgcaggcactgtgctgtgacggggagctcaagatgatctcaaaaaatttcacagatggggtgggcagggggcacagagagatgtatttagtggttcagatactatttagactgtggccagcatttctctaaatgcaatccagataacaccttacagaatcatctgggcagcttgataaaagctgtagactcctacccttcatcccaaacctattgaatcagtgtctgtgtgtgaagacctagattgtgactggtaattataccaaagtcttagaagcaactctaggccagtaatactcacatcagaatcagctggagggtttgctataccacagattgctaggttagccttcagagttgctggtccagtaactttggtgcaggtccagattttgcatttccagcaagttaccaggtgatactgatgctgctggccttgatcgtgctttgaaaaccactgctttagctacgctataggaaaaaccatataaggcttttatactggccaatgacttcacaggcctgaattttagaaagcccccttctgcagcttggcctatagattcgaaggaaacagaactaacacaagaaagctagttaggagctagttaaaaatcatcctgacttgccaaggaaaggtgctgaagacctgggtcacagagcaaatgcaaaacactaggactttgtccctagttcaccattaaatcaacttattttctcttaccccctcatattcacgtttactccttactttgtagtggttggacaaaaatcaaataaatctgagaattctaaaatgcacacccttgtttattttctaactcaaatatgccactgttgtctgtgctctgtcaagatttcaacacatctttttctcctgtttgcttttccttttggcatatagtgagtgtgtgtatacacacacacacacacacattttttttgactccttccaatgcccttctgctctccgcagatacacttctgcattctgaataaaaccgaatacatatatatatatatatatatatatatatatatatatatatatatgcacacatattttgaaaaccttatttgaaaagaaagctttcggaggaaacgttatttagccacttaatcgagtcttttactgagggactttttgtcgtcccctaacttcctgtcagcagtccacaggcagcaggaataatgtgggagaagatcaacaggcttatttcaggaggtcaggggccagtgccaccacctgcaggtggagacatcagaagcaggaagcagcccaccagctgcagggagaactccccacagagcctaaccaagatgaagggacttgtaaatttcaaccctcccttttggcttttgtgctaaaaatgtgaatattgaggtctgccctgattaagaactagatacattcctctttgtgactgccacacttccttagcgtattcattttttgtctttcgatctcaagttattattttcaaatgcattgcacgtatctaccatggataccattgcaattggaaggagcaaacgttttgtatgtttacttgacaaagagaagtgactgcccaagccacacagagttctgcacaaatcagtaacttctaacgaacgtttgcacttccgggcttgttctctacctatttcagtcgatgcatttgtattatttacttcaaactccaatactaataatgcctcaatcaggttgcaattgggatttgagcagccagaatttcagaaatttggtttggtccatatctgtgacaggtcagtaaatcagagaagcaagggtttggttgctattataatacattgcttacctatcaatttagttatcagccaaggtggttgttatcatccaaagtggctcattaaccaccttggagactcagtatacaattgcaagtaaccctggaagttgtaaataatcccaactgaatttgtatgagtttggtaaggttaagtggaaaccagctgcttagggccttgattataaatgaagttaggagtggaagaagtaacaaaaccccaggcaaattcattaaacattttttcccttcaactttatgctcacgaatgtgttgagactcttctgaatccataaaacacctttcagcatcatctgggcagcttgataaaggctgtagactgcctgcccttcatcccaaacctactgaatcagtgtctgtgtgtgaagacctagattctgactggtagttataccaaagtcttagaagcaactctaggccagtagtactcacgtcagaatcagctggagggtttgctataccacagattgctaggctagccttcaaagttgctggtccagtaactttggtgcaggtccagaatttgcatttctagcaagttaccaggtgatgctgatgctgctggccttgatcatgctgtgaaaaccactgctttagctaggctataagaaaccatataacatggacaaggcaaatgaaaaggttggaattcttctgaatcccaacacatttgtgagcataaagtcgaagggaaaatgattcttctgaatccagacacatttgtttaaggataaactgttttttccttctgaaaatttaatgtctgattctcgttcattcattcatcaaaagttatcaactatcaactataggtaggaactgtgcaatatgctggtgataaagagatgaaagacacagcccctcccttcaaccagctcctagttgaggtggcaagtcagctgtataatcaagtaattgcaagactgtgcactgaaaagggtgaccacagggtgtgatggccacccagggctgtggaatcagtcccaaaatgaagaatgaaagcagggaagggtaattcagaaagaagaaacagttcgcataaagacccatagataaacatcaatcagatgtggttaagacaaaagtaagtttctggaggctgaggaccttctcagctatatgtttgcagtgcttggtatagggctttatgcatctacatggaagacagaaagggccacatcacagtggacaaggcaaatgagaaggaggcagtatcagaagatgagggtacaccggagatcctagttatatatgggcattgtgttcatctcaggagttactgagtaatgggaccttgactcaaatgaatctcaagtctgtttttgcctaatcttggttttaggactaggattagcatacaaccgcactaggagcctagttatacgaaaggctgcattgcggacctgatacagttcaatatacatactgtcaccttgcaaatagggttacgttagttctcaagactgccaatcctctgtgctctaatccttttggcttttttttttttttttttaactgtctcactctgtcatccaggtgaagtgccctgggatgatctaagctcactgaaacctccgcgtcccaggttcaggtgattctcatgccacagcctcccaagtagctgggattacaggtgctctggcgccaccaggccctgctaagttttgcatttttagtagagacagggtttcaccatgttgcccagactgatctcaaacgcctgacctcaagtgatctgcccgctttcctttggcttttaacactatagagcaagggtccccagccctggggccacagaccagtacaggtcagtgacctgttaggaaccggggccccacatcaggaggtgagctgcagggccgccagcattaccacttgagctccaccttctatcagctcagcagcggtattagattctcataggatcacgaaccctattgtgaactgtccacacgagggatctaggttgtgtgctccttatgagaatctaatgcctgaagatctgaggtgcaacagttttatccccaaaccatcgcctcccacgcacctctccccacaaccccacccgcccctgatccatggaaaaattgtcttcctctaaaccagtctctggtgccgaaaaggttggggattgctgctatagggcgatggttttcacatttgatcctgcatcaaaatttccaggtgactcattaaaatactgattgctgtgccccactcgtaggagttctgataaggtagctgtggggtgagacctgagaatttacttttctaataagttcccaggtcatgctgatattgctttgataaccaaagcaatatcagctttggttatcaatatataaccaaagccacatagagggggagaagttccttgggtttagcccagtgtttactgcgaccaccaaaattgctggagcttaaccatggctcagagagttatgttctgttcactctgtaggctgctattccctgtcaccttttgaactatgatggaggggaagagctgccagctcaggagatttcacttttttctctgcataattgaaaatccagaaacacagggttttgggaaagctatagaacagatcatcagtgatcagtgtttaataaagtaaagcaataaactttactgtgtaaaataggatactttattatataaattttgtccccttcccccacctcacaggccaataaaataatatacttcttgtccctgggtgtaatgttattggaaacctttgaatgtaggagaggcatgggcttgtaagttgcagaaaactgctagcctaggattgagaatttcatggataatccaaaaatagatgattttacagttataagccttacgtgaacttgaggtaagaaaacacaatgcctttatagtcttctcagttgctccacatgccctctgagattctgttctgcccagcctctctggttgtcacatctctgggcattaacagaaagttcacatactctttgtctctgatgataatccttctaggtccatatagaagatccctatccaaaccatcccccaaacaaacctattggttaaatattttctccaccgaaggcactttcttagattctaagtgccctgtaggcaggcttcctctctgatttgggagagtacaaattgcgacaaggttaaatcatagcctgggaatttgacctaaaattcactcttctcccatatgcattcatgaaccttctgctggtttttaaaagaagctacttaatgtcagctcgaagaggttggaaggggttaaaaacatgagcatggcagtaagaagatttatgaaggatctgagaagattatgacttgatcagatggtattttgtcagctagccacatttgtgaagacttgaaaactagggaggcttgtccttctaagagggggcactgctgggacctggattctgtggaaccgtattagtagaataaacaataacctttgcttgtatcaaatgaacttctattctcatgtgtcttttgacatatttttattaatcatatcactgggacctccttgctgaaagatatctccgttccccattctgatgactcccaactaggagtgagatcaaatgaagatggcatggaccatttctccatgtgacagctctctgtggttgccttttaacacttctaatgccctttctcttaagaattcccatttgtcgtctggcactggtgctgtgatcaataaaaatgtaatggagtgaggcttagaaacatgaggaaatttactcaagctatccatttattgatgtgtccatttgtgttgtcagggaagaaaaactttttcactcccctcttaggttcattacttggggggctgcaaattaaactgacgacagatagattggcaatagaaaagacaaagtttattcagagaagtatgtgggagctcacagaaaacatagctcaatgaagttagaatttggggcttatgtactattttaacaagggttttgaaaagaagagtgttagaatttcaagccacaaagttggtgggaaatatgaaagaaactaatgaaaggtaatgtttgttttagtaaagtctgtttatgtaattttcttttcccagcgacaacttctcatctctggtgacaggagtcactctttacccctggtgcaagaaactttccttaaaggaggatttaaaacagttgaattatttcagaaatctttgcttttaggcagatagggggagtacagaaaaagccccttcccgtatctgttgatcctcaaatggctttagctcaaaacaatttttacatcacgatggcataatgtagatctcttcaatgtgttcatttattccacagatatttgtgaagtacatgatatatgccaggtacttgggatacaagaatacataagtatgtccctagtctcgtagaacttacactctagtagtgagctagagaataaatgatattatttattatatgcatacacatatgatttcagatagtgatccatattggaaataaagctggttaagggaatagaaaatgatattgaaggtggacttgtttagattgggtggattggcatggcttctctagggggcagtatttgagcagatatgagagcagatattctccaatttgggcaaaaacattccaggcagaggaaacaagggcaagggcactgagttcaaaagagacttgacctagccaacaaatagcaaggattccagtgtaagagaaggtggggaaggaaggaggtgcaagtataggcaagggcaagatcacacgggatcttgcaggccgtgataaaagaatttaactctttcataattttgacaggacatcattgaagaatttagaaaaatagagtggagatacctgatctgctttcttcaaagagttcattcatcattgctgagtagaggttagactgaaatggaagcaatagtgaatacagggagatagcacaggaagccacgttactagtccacatcagaggtggttcagactagggtggagtggtggggtcagttagagagctggtatttaggatacattttaaagacaaagctgacaggatttgctgtgatgaattagatgtaaagtatgagaataattgagaattatttctaagttctttgctggggaaaagtggaggaggaaaaagttagggtacaaggtgtgatgaaatcaagagtctctcttattatcagagtctcattagatatccaagtggaaatgctggaaagaaagttgggtagatcagtctgaagctgaagacagatactgtgactggaataataacgtaagagttggccggacacagtggctcactcctataatcccagcactttgggaggccaggataggagaattacttgagcccaggagtccaagaccagcctgggtaacacagcgagacctcgcctctacacacacacacgcgcgcaaaaattaatcgggtgtggtggcacatgcctgtagtcccagatactcaggaggccgaggctgaaggatcacttgagcctgggaagtcaaggctgcagtgagccgtgatcacaccgctgcactccagcctgggcaacagagtgagaccctgtctcaaaataaataaataaataatgtggcagtcataggcccttagatggtttttaaagacatgggactggatgaagtcttctaggaggagagtttgggaaaagagcccgagaattgactgcacctttcaaaacaggaggaagaaaaaaaatactcaaaggagacaaaagcaacttctgtgatttatagagaaaaccaggcaagtgggatgaagaaagtccttcatgatagaatcaaaaacagtgtcaaatgttgaaaatacaattagacaaacacaaaagaatagaccattgggttttgcaatatggagctcatacttgaccttgataaaagacattttcactggaagcatgcatcaaaaaactatttgtggtaggttaaaatgtagtaggaggtgaggatatacagacagtggctttcactgtgcagatactgctgctcatgcactaattaaaagacatttgttgagtatctactatgttgtatccattgctaaatagtaacagctgggtttagtcaggtagaacagcatcaaaatcattatagtatcccaagataggtacagtaaaatctgtgaaggaatcagagtagtctcttctccaacagagcgtaagacccagcttcacggagaaggtggtagattagctcatctgggaggctgagtagaagcttgtcattatagagggagaacatcagaagtgtggacaacagcttgaataaccttgaaaggacaaaagaggacggtctgccctggaaatattaagaagtctcacatgattagacacaagatattaggggaaaggcataaggtgaattgagtcaatgaggtcaaagagaagctagctggaggaacaggcgatcataaaatgagtaaaagtatatattcaaagattctttttagaagggctacacaggatggataaggggagagagagagttgaggcacagagacaaattggaaaggtgcaatcataaccagagacatgaaaaacccatagaaatctgatgtagattatgtggtccccaaggttgaacaattaagtacgctttcagttgttatgcccatgatattaacatattttataactgcaataagtgctgaagctaaagataaatacaaacaatgtaattcttattctgtgagaaaatgttgtagctggaagttaaacatgtttcttagctaaagaaaaatattgtgtgatctggattacttaatgttataatttagcaacaaaatgttgacattgagccttgcataatcaaaaaagtagtctattcaataaccacattctcagaaaaaaaacaagaaaatattagaaacaatgataaattatcgtagtaatttaattcagtattctattgttttatttggatttaggaaaggcagaaatgttgaaatattaatatatatccctgtaataatataatttgtgtctgagaggtaggaatgagggcatgaggtcaaagtttgataatgaacttcaaagctataactatgatcaggaaattaaaattggacaataaattcctagaatcgtcaggagttgcttgtgaaatcgagaaaggaaaggatatacacaaaaataaagaacagccaatgctctcaaaggagtctaacttttataatagtcttctgtgttagagctgaactcttctggtttagaaggacactctgttgcctggaaatagggcatggaaaaagtcatcagagtcatgtcatctttcattcttcccatgaacgaaatcgaggccctgaaaagtcacctgtgtttgctgtattttattgcaactaagatgtgcatttttaaattgatacataataattgtacatatttgtgggatacatgtgatattttgatgcatgcataccatgtgtaattatcaaataaggatatttctgtatccgtcacctcaaacatttaccattgctttgtgttgggaacatttcacgtattttattatagctattttgaaatacaaaatagattgtcattaactatagtcaccctactggatgcaccttgtttttaatatttctgaaaacagatacgtctcataggtgatggtgtcacagctgtgcattagttattattgcctgtgcaggtgcaaacgtaactattcatattgttgtcaattaattaaatagttacatttatttatatgcgtttattatactaataaacacaatattgagatagttgagctctagttttgactctgctgttaactagctgcgttactttaatttacttaactaatttggctttcaaattcctgataagtaaaattacaacatgagtttctcctgctataatagcctgagaaatcggtgaaacacatgaattcagatgttgatgctatttaatagcgggattccagatatctacttgccattatgggagggagagaggaggtggactggaggctgtgatttccctaggaggttgttaaaattggccaggtgaggaaagctgagacagaccataaatatgaagcatgatacctagccctcagtgttgaaagaaaatcaaatctcatctttgtggtctaaatatcagtatgatacaatcctctgtgtagacatatcctctgccctattgttttctttctaaaagctaaagcccaggtgtgatcacatccctccgttatttacaaatttctgatgatgatgattcttctaatatctacattccttaccattaccatgatgtccaaaacctattataatctattcgtctccaagtgccatgttgtggtcaccctatgcaccctctaaacccaccatatgaccttcccgctgctacttgaatacagttggccctctacctcgttgtgtctttgcattgcctatttaattgcctttccattctctaaatcactctttcgctggaccagcaacatcagcaccatctgggaattcattagaaatatagatcctcaggcctcatctcagacctgcttgatcagaaacattggagagtggagatgagcagcctgtatttttatcagccctctaggtaatttgatgcacactaaagtttgagaaccactggtctagagcattcttctttaactctcttctaaaaattattagaatgaattcgagggacgggatctccttgaaagccaagaacatttctttgtcatctttctgacttcagggcgtagtacactttttggcccataattaaagctcgataaatgcattctatgccaataaatcagctaatcaaatatattattcatgcccttgaggtatctgaaatttgtttgcagaatgtaatatataactatagagtaacaagagaataatttattgccatagataataaaacaatatcctctgtataataaatcctagcctctgctcaatgggcaaaaacgggactggggtttcagattttaaaaagattattggtaattaaatcacctggagaagcacttgctgcagagatgggacttgaagcatcataataaactgttgtttattatgattcggtcagagctgatggaatcacagggattgtgtgaggtatggaaagtggttgacattgaattccaggctgcacagttgggacttgatatgataaccaaaaagaaagaatgtctggggtggtagcaagctctaaatttagacaatctaggcttatcctaaggagaatatagatacagataactgaagtttgattaaagggaacctggtgtatcacaaatagtaaaaagctgtagttagtctatgcagctatcagctagccacataatacttttgggcaaatacattataaaccaaaagaatgacatggcttatctctgtaacaaagtggctcattgttctttattctactgttatccttaagaaaaaaattttagtaaatttgttatgctatactcaacttcaagaagggatagcgcttataaaaaaattgtttaaagaaacaggcctatttctctttgggagaagccacggagaaacgaaaagaatggaacgtgtgtttctgcccagatggcaataaaatgtagggtaaatttctgtcttttaaaactgtattttttccatccctctgtatatacacatatcctaggactgttataaaatgctgcatgcgtatgtgaaaatggaaccttattgggctgtttgatggacctttaaaatatatttgttggtttggggtacatactagctatgcaatataatccgcattatttcttatgtaaacaatggataaactgtttcacagtccagacatttatttggtcactgtttgtagaatgtctattttatttacttctgaatttgtattccagagatctgccttcaatgttggatacttccactgtaatattctaggagatgctcactttctttttcagcatctgacacagtaccatctgcctcctcttttcttgccacaagtaataacaattttataaaggaggatcacattacagaattataggtggtaaactttctaccaccagatttacccaagaacctgaaacacattttttcaaaaggaaatagaatgtccttcttgtgactacatcggaattttgcttgcagcattatgctttttttttccccctagtgtagctagccatgtggaactgaagccattagccagctcctcatcctataaatgctattacctgggaaaagaggcagaaaatatactctcttctccagttagagtctaaaggaagagaacaatatgggtagttgtgtttaccacaaattgatagaactcctttattttaaatgctaaaaccaaataacttgtttatatgacttcaacattgactatcacacactgttgcatgataacagagtgaaaactacctctattggatttaagtggggaatctatgtctcattctcattctttttttactgtggaaactagttgattccaggatcagccttagctccaacttgccacactttgagttttggtttttcacttgcattgtcacaggaaacttctataggataaatcgaggaagattttactctgcaacgtgttgcagaattaaacatttaaagtggcaaaaccttcgtgtgtaggttgtctccccagagaatgtaaaaatgaattgaaggcagcacctaataggtaaacgacagccaatcaaacaagaacaaatgaaatttgactggcaaaatcaaattgaaaatgtataacgctgaatctcagaatataggaggatgcatagaaactaagctgtactattataaaagtcatagccattgaaaaataatgactggttaatttggttttctttacctcatggatgtgaatggttagattttgatgttggtgttatttgacgtgtgtttgtcaagaagttgccttagtcggctcgcatttaggataaaaaaaatattttaagaaatgtttaagagattatgttggagacattagaaacaaaataattatgcagagggcaggactatcaaaatataatagaaaaattacaccgctcttttatgatttcctcctttttggcatttaacacaaaactttatgattacacacaccacgcactccagaaatgcttaaaggaagatgagaggaaaattcaatagaagtagcaggcatttctgtgaggacagcagaatgatcacttcatctctgtattttttttttttcaaatttctgtatctgtacaatgtcttttccagctctaatattctgtgatttggtaatttccgcactcagattttctttaatgaattttgtatgatattacctatttttataccagatattacctggctctaatttctttttcaccctaggaaataaaagtatcgggtgaatttcccattttcttatgttattgatacaggtctctgttggatatccccacgattaactttcctgcagcatgttcgatggtggcttaaagaagaaaccatgtatcagagccccttgtctatatagacttttagataaagagaaatacatatcacagaattattctgggcgcatagagtctctaaatgcaaaaaaaaaattgtattgtagctgttgattcttctcagatagattgagtgtagagagagagcattccaaaaactgagcagaagaaacacagtctgaatcaaataacatgaaattttagctaacaagtaaataacacttttttcagaatatgcaaataatattggtttattatgaaaaatgtataggctgatagatgagcatagagaaaaaattataaatatcttctttaatatcactttccccagcaaaccacttttaacattttgatacattttcatgttcaaacatttcctaatagtcttttttcctgttatataaatatgaattttaaacattcgtatgtttatgaaaaggcaataagatactgctcttttataacaggctttctgaacttcacaacatgcagtgtattctaacatgctccttgtgttcttaactaataaaaaacctcacgttatttaaaaaaccatcttaaacataattatccattaagagaagaggttggggtagagagtttcagactatcaatatcaaagttatattttctgtaagtattttaatttttaagtgtagctataggtatatgattataaaaccaatagcagagaaaagataccacctttgaatatagttttccttggttccatgaaaatggcctcctttctttttgccagtccctcagtatcattaactcatttttctgtaaatgccatcattgtatcacatgtcctcaggaaaaggcacttttctcttttaagctagtgtttgttcttgttctaattttatggcaatttaacgagtaacaatcctgtttctataaatactgtttcctaattaatctattgcattctatccatgagaatttagatgactttctttgtaagagaaatctctgtagcatgagattcttctttgctcttaaatttcattctttcacatttttaaatgacctgatagtattttgttgtatttgtgctgattttttttaaccaatcttaccttgttgaacatgtaagttgtttctaatatttgcaatgatcaaaatgtggatccaacttcactaaagcgttaagaatctaaaacaaaacaaagaacaaaaagttggctgtcatcttgcttggaccaccccgtgagttactattttcttgtttccggtcacagttcatcctaaatcatttcagtacacaaaatgttttttaaagtttgggacagggggtagagaatgtcaattattcctccaaggcagtcatatgagcattgagtatcatgtggaatagttgttacttgtaaagttatggggcatcaaacccagtcaatatgtttctggaattgaaaaagtccctggacattctaatgatactgttgttcactttgcacctactgttaccactactttgatctgtcaacactgcccgtaatggttaattttgtgcatcaacttgactgggctacaaggtgcccagatatttggtcaaacattattctgggtgattctgtgcaagtgttatcagatgagattaacatttaaattggtagactgagtaaagtagattgcccttcctaatgtgagcagacttcatgtaattaattaaaggcctgaatagaagaaaaacactgaccctcccctgagcaaaagggaatcgttctgcccgactgccttcaaactgggacatgggctttttcctgccttcagactttaaccacaatattagctgttcttgtatctcaagtctgctctacttcgattggaactacactatcagctctctcgggtctccagcttgcttgttcaccctgtataccttgggagttgtcagtctccatagttgcctccataattgcatgagccaatttcttaccacatacaaacacacacagagacacacacacacacacacacacacacacacacacatataattatatatgtgtgtgtatacatattctcttattccttttgtttctctaaggaaccctaatatactccttattactctttctactgccttagagatcttcaaggccaagagcgtaatcctccatcctggctctttttcctaatcattaatgatcaactcatagccatttagctcaactaaaaataatttgttcatgaagctttacactcccacatactgaggaacgtggtacctaagatcaaacagtcactgcctcatcaaatgcattcctcttcaaccccatacaaatgtccccagatggaactcacaccataaaaatattagatcccattgacttttctgctttctcaaggatcattgcagagcttgaaaaagatggctcctccctttgcctaagcaggttaacttggtgtaaaagtacatgtaagatttggcacaaaggaaaataaatcagttttgcctgggtcctaagaaacatttccctctgcctcatggtaattgtacctgccagttgattgcattactcaagtggagaccatgaagtgaagtggtagaacaagaagaaatccctataattttattaagtatggtgaaaaatacagatatgtagagaaatgactgggattagatggagcaaaacataattcgagatcctgatacaaattgtacttcctggctcaagggagggagcagaacattccctgctacatgggaataataataaatgcctgataaaaatgcagatatatcatagactacagaagctgaagtggattcttatggtcccctactcagacagcctctccttcagatgaagaaactgaagcacagaaagctcatcctagtgtttcatattgaaaaacccattcaagtctattttaataacctgttaccaaaaatgagggaaataatttaactttaatgtttcactttgcattacccttttcctgactagacttctatccttttcttgagttgagctcattaactactatgaaattatggttatgggtagaggttaattttatacctgtccatcttctggcatcttatttacactaaaaatcatttttaaatggcttcattttaaaaaatattatttcagttgacattttaaaagacacatcatttatgtactacagaatatgcattttatactctcctttattaattttattattttccaggtagaccaatcaaatgaatcagaaattcttggttagatctattagacagcataagtatgtttttcatcattaaattaagatgaaaacacaattttactttaaagtgtttgacgtttccagcctttataaagtcaacacttaatcacatctgaaatttgcaggaaaaaattttgaaagccttcaattattaacattatttcgggagaaaaagccactttgccgcagaactttcacttttctctcgtgaattaagtctgatacaaattattcattatggtgaagtttaaacataatagagtctagctacttccacaaaaatactattcaatgagtttctacattgacatctaactgaccttgtaattaatgttgtacacgatccttttattatatgctggattatcaaatatgacttattagcagtataaagacacaaagttctgaaatgtaatttatagccatgaaaaggaactgagctttgtgtgacagttaaatttgaagagatcaggtgattattatgaagcatgaataataatgcatattaaactcacgtttttgtttaaatcattaatatgattgttttagaagaaagtctacctctatcatatgggcaataaaatgtgtataagagcaaacatttgtgtatgtgaaataactcaaattaaaaccagttttccacattaattcttacagtttttaaaatttaaatcatttaatgtatcacacatagctttattcattttaagctataaatgttacaatttctgtttaagctgttaatataagctttgtaagagcaattctgtataaatatagaattgtcattattcactaatagctaccatttatttagtgcttgttgagtgcaaaagtactgcactgagatctttgcatatgttctcttaatgttacaattcttacctgaggcatttctgtttctgctggaatatggtctctctgaattgaacaagggaggcatttttggttgttatgatgaaaggtggacactgctggcactaacgtgtgttggtaagcgactagactcttcatgatgcgtaaacagtgtttcctcatacccctgcacattcaaatagaggaaaaccttgtttatagttaatttcccctagaatgtaaatccatttaacatataaacacaaagcgtgttttgtgtggatgttttttactggagcagggagacaggagaggaaatgcagttttgatagttgctgaatttttcaagaatgcagcaattatagaacaatttctagaagtttcctaggagctcttttccatagcagaaaactaggacttaatagccttgcgactcatggtacttgagtgttccatacaactcacctatattcaggggacatttgaaaaattctacattaaaggggattcttaacataggcgcaagtgtctggcatcttcaataggtcttctggtgtggccatgaaaacattcacacgtttcaaagtattttaaaataaaataaaacatatattgttgtgttatgaattattttctttcttttttatatgatggttagatcactgtgcagacaagtttatgagatctattcatttcatttcagggtggtaaatgagggtgttactaaatgttggttctaaaaagggagacattgggtattacagaattcagaacagctctaagccctgtgcacatttagcattagaggacacaggcaaatctggcctccagtcctggcagcttcttcactatgtatatgatgttgggtgggttgctttacctctctagtttttacttttatttctaagctagggctattcatagttctttatcatgtggttactgtgaagtagcaaagcacctgacataattagagcagataaaatgctcaacaaatattgcttatcagaaggattatgtattacctcccgaaatacatcaaaaatatattttccaattcaaagaatatgtagtacaaaaatcatgcctaaattaacagagttgcagtagcccaaggagagaagataatcattattgatttcttcttcctttttgctaagcagttctctgtctctgcctcctcagttgttgtccatcccactcccccactcccaagccctgaactctgaggggtttgctgccgtggccggttctgtagtcattgctgtccaatgatgaaaacacaaaatactgcaacagaacactatgcctgtcagcttagctcccttctttctgctaaatgacactcaatcctattcttttgttctaaaggatatcctaaatgaatagccactggggggaaaaaaggttatataagattgtgcactgtgtgaaactgatgcaaccagatcaatgatgtgaatttctcttaactatttactgggatctagaaacaggtctctcaacttagcagtgtttacgaatataataggccttccttatacatacatctgaagccaatctgagtcaggaagagtcgtggtctgataaatattttgaaaacttgcatttgttctattaaagcaaactgtttattaatagtgtgccttattttttaaagcaaaacatttataaacagtagtcattacaggcacttcagtgtacggagtgatcaattgttagacctttaggaatcgattgtttcgtggagcttcggcttataattgaaatgtcatcagaaggagtgtaagacatagcttcaggagaggccatttatgcgcttttgttttcagctaagttatagagtcatcatgtgaagaaagattcttctcttagtaaaaatcctttaatggttggaataacacttgatatttaatatttctttctactttatatccacatttattcaagtgctaacgcgtgtggggcagcaatgaagcactttattccaacattatagttctcatatctgcgtatgattatttttcatttatcgttagcatatatataatgatgacttttaaagtacactgtattatattcactggaataatgattagctattaataatttgaacactatccaggaaattactgaacatgtcctacaagataaacctcgtatgatattgtctccaaataacagtgctaaccaagaagagtgctaccaagttcaaaagtaatcacagggagtaacctaaatgcagctccgttgggttaaaaatagtttctctaaattatatgttccctaagtttgagatcgatttctacaaggggataaaatgtttttataaattctcagtgataagtcatgtgattaagaacccccaactttttttccaaagacatttgcatctctgatcaaaataacaagatccagtcttagttataaattggggaattttcatcaaaataaggagctactcgttgcataagaagactagtacaacttaaagccaatttaatttcaatgaatgcatgatcagctccattgccaattgagtgtttttcttattcatcagaagatgggttcatcatcgtgtttcatatcaactgttctcaaaccatattgcccatttaaataaatatagatttgtctcgaaattctaaattcatgtcatatttcataaatagcctatggtcctatttattactttaaaatattatagatataatatttttattctaaagtaactgtgttatacaaccaaattattcatttaaatatgtgactttttaaataagtaaatgacttatttaagtaaagtcattaaaattttccagtctgtccttcatccacctgatctttgaatgagttaggaacaatacaggaaactaatacaaacttaattttgattacaaaagatgaaatcattctgttatttattcaacacactatgtgtcaataaaatcttatactgtgaaagaattcgtctaagtccatttgctgttgcttgtaacagaatacctgaaaatgggtaatttacaaagaaaaggagtttacttcttacagttacggaggctgagaagtccaaggttgaggggccacatctggtcagagccttctcccatccaagtactaaccaggtcgaacctcacttagcttccaagatcagataagagtgggcgcgtttaggctggtgtggctgtagacttgttagagcctttttgctcatggggacacagcagagccctgaggcagtgcaggacattacatggcaagaaggctgagtattctaatgtgttcatgtctctcttcctgttcttataaaatcatgaatcctactcccatgataacccattaacctattaatttatgaatggatgaatccattcataagggcagagccctcatgatgcaatcacctcttaaaggcacaatctcccggtgctgccacgttggggattaagtttccaacacatgaaatttgggggacacatttaaactatagcaaaattgtaataaaatgttatatagaagcaatgttcttactgattataattgttatattggtaaagtgttaagtcctctaaccaagggatatatttcagcttattataatagttttaaatttacaattcaatatgaataacatctggtaaaagttcttttcaagaaatgggaaaattagaaatgtttagaagaaaataattcaataaatattaagttcaaactggattcatagtttatgtgaaattctgggaaccaattgcaaggggagaaaatagttacaatagcaatggtgaggatgagaataagagcaggtatcaacgttaattgagggtgtgttatagttctaatcgtgctatgcccactacatgacttttccctgtgtgaggtttccgagcttcttcgtagtaatcctaaattgagctggagagaggctagggtaacttactcacgctcatagagccatagagtagtaaaacctgtatttgaactctggcctgtctgacatcattctgtggtcttttaaaccaccactgcttctccatattaaaactccaaatctaggtgaaaagaagaaaactcagaacatgttctgcaacaaaatataacaaaatataatgtatataaacacttatacataatatcactaatatctttactatgaaaagactctgatacgaacattttacataattcatgcagaagtgttaatcacattgtctgtgatgagctgtgtatgtatctgataaaattctggcaaccagacatcaactcgtaggcatagatctgtaacactaaatatttgcctcgagaaacttaaagaaataaagacaaatgaatgaataggaacatggaactgagtacaagataaaatcctcctaaagcaatcgatgtacttgctgctgcgttattgttctaagcaaaagaagcatggcgaagggagatgtgaagctaaaaacagaatgcttagaaggagatgatagcaggagggaagcaaagatgggaccaagctcccaaaaggcgggctttgaacaaacaaaacagaaagctaagcctttgacggatgcacgggatgcaagaaactttagtcaggaaagaggaggcgaagaaaaaccctccaaagaaaaggtgaacaatattttaataggcaaattgacagatagcaagagatatataccatgctatgttttctcattgcagctgaagacaaactggggttatttatgctttgaaaaagcgtaaatctaaaaaacaattgtggaggaagaagcgatgaaaacacgtgttaatacagaaaacatggctccaaggctttaaacttccttgtgagataaatgcatttacattttccgtagtagctaatatatatatatatacatatatatatatatatctgggaaaataatacacagtgattttctttctttttttcatctacttatgtgagaaaaaagtaggctatctgaaagcttttcagttaaatgaggaagaaagttaggtgatcttgtaaataatatatatgttcaagataatgtaaggcccttgtgtagttttcaaaacttatctttaatagcagtttcttctggggatggggtagttcaaagttgaaatgttagaaagatgttaactttttttcctttttacttctccctttcaggatggaattaacaaatttgattacaaatagatctcagagagaggcaaatgcattgaatccagaagtaacataaaattagatcatgtttagttatgcccgaggtcacatggtgataaaaatgaggataaactgaaattgtctgtgagccagattagtttattttatgccagtcctaggaaaaagacacatcatggtaggatacatcctttttttttttaattatactttaagttttagggtacatgtgcacagtgtgcaagttagttacatatgtatacctgtgccatgttggagtgctgcacccattaactcttcatttaacattaggtatatctcctaatgctgtccctcccccctccccccaccccacaacagttcccagggtgtgatgttccccttcctgtgtccatgtgttctcattgttccattcccacctaagagtgagaacatgcgctgtttggttttttgtccttgcgatagtttactgagaatgatgtattccagtttcatccatgtccctacaaaggacatgaactcatcattttttctggctgcatagtattccatggtgtatatgtgccacattttcttaatccagtctatcattgttggacatttgggttggttccaagtctttgctattgtgaatagagccgcaataaacatatgtgtgcacgtgtctttatagcagcatgatttatagtcctttgggtatatacccagtaatgggatggctgggtcaaatggtatttctagttctaggcccctgaggaatcgccacactgccttccacaatgaacagacacttctcaaaagaagacatttatgcagccaaaaaacacatgaaaaaatgctcaccatcactggccatcagagacatgcaaatcaaaaccacaatgagataccatctcacaccagttagaatggcaatcattaaaaagtcaggaaacaacaggtgctggagaggatggggagaaataggaacacttttacactgttggtgggattgtaaactagtacattcttaacatcaatttattcctaaaagcaatgttcatagggcacactgtaggccatagatttgcctcacaaatttaaaggcctaagccctcaacatgcacagcagtatactcagagactatttgtaaagatgacgattctggaactttttaatgaccccaatcattagcaatgattaaaattaatattcaacattctatatttaccaaggcaataaagtagactaatctattttaaaagggttttaaaatgaagagatgaaacaaaccaaatgattttgatttaaacttcatgaaaacataagttgcattaatcaggtgattttgttttatgagcattctgattgaagtgatcatatttagccccgggagaataagagaaggtaaagtatgggtatggcactgaatttactgagatgattatattgtttgagttaaagaacttgtattaagaaacaagtatgtgccaaacattgtgctaggagcaagcaatgctaaaattacatgggtagaaagagagaatgaaatatctagaatgagttagaaacatcagtgttttccaatgtggagccctgacttcacatgaaaattctcattttcaaacaaggtagtttatgaaaactggactattagcaagacagggtgggcatgccatcagtatagtacctggtgtaaaactagaaattttaatcatttgtgctttcattttataatcagtaaaatccaaggtaggacaaacttttactttttctgtataatggactgatatttgaattatacccaactttaattttttgccagaaattatgctttattgtttctctaaaatggtactatagatctttatttatttctatatatttatatgatttttacatatatgtgcatttacatgtatatacatccataaactatatacatatatacacataaattacaaatatgtgtacctacgtacatatatatgcatatatcacgcaaatacaggcacattttcaatacccctttttgatttttttccttgaagagcatagcatctgaatttattatggatttatttttaatttatggtcatgttctttgagtgcttttggtgtttatctggttgccccaaactcgctagcattgtaaagaagatgtgcaaagcctgaatctagactgactttcatattgactttattagtcaaaaaaagtagatgaaaatgtaacagtccgtgttaaaaatgggaataagacagatgttcaagccctagcttcagcagtttttagctgagatttactggaagaaaacattttctgaactgtaaaacatgcaaaatgcctacgtgacagacttcattaacattattaaatgctatgatatagtaaaagaatttgtaaactgtcaagtgctttgtcaacattaggaatttagttattataggtatttccatatacatgttgtatttagaattccctttaattttatacttagggttgatttgtattttaactaagtcactttatatatctggtcccattatacaagtatacttttccttaggataagaaagtgatctttatatatgtttatcaacccaaatgcccatcagtgatggactggataaagaaaaggtggcacatacacaccatggaatactatgaatccataaaaaagaacgagttcatgtcctttgaagggacatggataaagctggaagccatcatcctcagcaaactaacacaggaatggaaaaacagacaccgcattttctcactcataattgggagttgagcaatgagaacacatggacaccgggaggggaacatcacacaccgaggcctgtcgcgaggtggggggcaaggggagggagagcattaggacaaatacctaatgcatgcggggcttaaaacctaaatgacgggttcataggtgcagcaaaccactatggcacatgtgtacctatgtaacaaatctgcacgttctgcacatgtttcccagaacttaaaatttaaaaaactttaaaaaaagaactgtagatactgatccaaaaaaaatgttcattaatgggggttaaatgattatttctaagtagactactcttgaacccttgaatctttaagaattttctttgctattgaagccattcaaactctattttattaaagctgtcgttattctagtagattttaaacagtaatacctgaatacattagaaatatgcaaatctgcattacatatggcatctgcagagcagaggagtttggtcatctggactcatgctaaagtctccgaaaaatccgcttgtcttaatgatggttgactcgctaatgctatgcgtatatagtcttattttaagtgattgaatgatgtggctaataacccctctgttagatgcactcagaacctcacctacctgggtcctcagctctccagtgaaatctctactttaagtttattttctaacatggtaagagccttcagtttatgttatgctcaggcccgtcactgtgaataaaatattagaaatggactttttttttttgtatttttttaatggatcccttggaactttaaaaaaattatttatttgagctttctactgttatcacagtgtctcctaagcatggcctcccgttttttgttggtaatataattcttacgttattcaaattagtaaccattatttttctcatggctagaattctggaaactattaggaaatcactgagcataattgaatggctgtttatttgaagagctatgtcaaggcagcatagagttgtattttcttgcaggggctctggagtcaaagagcctgggttcaaaccttggctccaccactttctatctgtggggcattgggcgtgttacatttgtgaaacttttgtttctccatttgtaaagtgaggtttgggggatgattaaaccagataactcatgtgaaatatttaatggaaatgtatttggtaggggatttattatttttaaatttggattgcacatgacacatgtcagggatcatgctatgcattttggatagaaagatggctaagatatcatgcctgactcttaaaaacttacctaatggtaaatgacgagttaatgggtgcagcacaccaacatggcacatgtatacgtgtgtaactaacctgcatgttgtgcacatgaaccctaaaacttaaagtataataaaaaaaaaaacttataatcaactgtagtagaaagagatctgaatggcttgccatttagctaggcacatggtatatgtgcttaattcatactagcagccactacagttgtcatgattaataatgagcttccaactgcacagaatgcttttaatccatagaaaatcaaatcagaaacaagtttttgtaaaattaatgtgaaaggagcaacaattaaaatgcaagattgacatttattttctaaattggttctattttctttcacatttacaaaatttataagaaaattctttatttctatgtgatataaagaactagaatgtactttgatgtgaattattgttgccagtgctgttcaacttttatccataatttactaagcacctacatttagacaaaggcattatccatccctttggggaggatttcagatgattcatacacagacctggtctcgaggaatttaagattttctttggggagggaaataaggactttaaccaactcaagagtacttagagaattttctgaaaataattttatcaatgaaaacttgttatattaaaagaaactgtcattctgacttccacaaatctaggcttgaaactatggataacgagatattttctattactctcactcacgtcattttcacaaagtgaaaaggtacattttaactagtgaaagaatagaggaaatggaagtagctcgaggcagtggacgatgattcaaaaagacagggccctattatttgatcaagttatgcaacgactctgggcctgtttcttcacctctggaaggaggaataatctccaagccctttcagactcttttggtaattcacctccagcacatcttctaaatgccagcattaactgtcctctgatttgtctcatgtttttctagccccatgctctcctgttcgccatttaccctcatgcaaggtacaaattacacccatcatcacaagacacttgctcaagtcccattgcccccttgaagacctgccacacctactctctcaaaaaccatcatttcctgaaagtcctatacagctcatttggtatttacagtgtactgccacaagccactaagcatcgttttgtgaatacatgacttacagacttagcttgagtaaagatacttgaaaatgaacaccatttcttggctatcttcctattttgatgtacccttcaggcctatgaattttagtataatagataaccaataattatttcttggttctttcctgcacatctgaataaccctatgcaaagtgatagaatgtttttctataaggaggtcctacactggagattgtgtatttcttaatgctgttgaaggaagagatgtgtatctaaaataaatagactctaacaaacattaatttatatttctattatctgttttgtgtattgagatatctcacaaaaataactaaacattttggcattattgatattacatatttgccatgaatatttgtaaatgaagaaaaatatatatacatcagtaattatcttggcaaactcttcaattatgcaatattgttacatagattacatatctaagtgaacactggagttttaacaatattgtgtgttcataaatgttttatttattattgccactaattcttattgccatttcaagaactatgtataagttgttctaaaaactattaaagtataggtgaccatggtcactactgcctactttggtaaaggccaaatatgtgaagactttttaatgtgttaacaaacgttgaaggttttttaacctgttaacaatcagtaggactcttgaaattatttcctaagagagtaaattttacaacttgcaaagcatgattaacctcttgtaattataaaccatctcttgtagttatgtagcattttgttaatgagcaaagaaccattgtggttcctttttacatttcttaaaataattctccgtaacctcattgatatctccagtaaatttagataagcttttttttttaaaggagggttaaaatgacattttaaactaatttttcttgttagttatacagagttgaactatctgagggttttattgacagtcataaaaaatttgttattttctgtgaaatatagagaatttaattcattatcatattattaattctgtgggccattgtcttaattctagaggcacaagctgttttcatcccactgaaatagaggaatcaaagtatgttccttgctcaaagcacaaaagtgacatactacatagtatgcttcttgagtagtcgtaaatctcatgtgttaaattacatcccaaagatttcagtatgttttatgactttaataatttatggtaatttctaatctggcctttgttgacctgtcttgctttttaaatttttagtttttcgacaaaataattaacatattttaataatcttccaaaggtgtttaaaatggcattgtatagagatagctgaaggcttttgagcttctgtgttgtaaacactttcttaataaaacatgaattgctaccagatgatccagcaatcccactactgggcatttatccaaagaaaaggaaatcagtatctttgaagagatagctttgttcccatgtttactgcagcacttttcatactagccatgatatggaatcaacctaaacgtccatcagtggatgaattgaaaagaaaatgtggtatgaaacagaaattgctgctttaatttatattaaacacactcatattcttctcagctgttaagtattgagttatagatttaaagaattctattgtgaagactaaagtgactattaaagtaagaaattattttttccattatatttaacttatttcatactttaatgttagcgccaatgagcaagactattgaatacaaaaactaattaagtagtggtgatagtacagtatataagggagaacattcttttagaaaggaacaataacagggagcaatagaaacaatgaatgagtgtaaggtcacttagtgttaaaacagctaaaatatagtacaaataagttgcgttttaatagtgattttatataattacaccttgatgttttatttgttacaagaattgtccaggaagatttctctaaagaccaaaggcactcttcccctaaataactccaaagccagtcctgtgtttctataaaaaaaaaaaaaaaaaaaaaaaaaaaaaaaaagtgaaaataacgtgatgaacatttttgaggaagtataaaaccaaaatactccactgcatagctgtttctgcaggtattgtattgatatattacattattcagctttggagtctccacatccaatgttacatcatcactctaaattaaacatgtatagataaatgaaataaatgagatagcatatgaaaatctcatagcccagcccctgcactatttaaaatagaaataccaaagaattgtattcctcatctgaaagctatttagtggtggtgtttcaaataaaaattccatctactgctgttgcttccattgtatctttttctctgcggtactgaaagagaaagagacccagaaggggccttgtctgaagtgtccctcttttaagctgttgctgctttaagcacagggtggacaaatgtaataggagtttcataaaggtggaataaaccagcggattacggtgtgggtgaatactttcagatgttaaccaggagctctgcttgcatgctgggagttgcccatgcctcttctagattgaggcacattatcatgcacaacctaactccaagaaatcttttaaaccactggaaattgaacccagaacatgtctctaagccagccttttcatcctgacaccgaatcatagcatgagccagtctgtcagggatgctgctgctctctaggcaaattttaaatgttgaaataatgaatcatgttttcttgaaaaccatgtacaccaaagaaaagttagtcattttatagatgatgaatattaacattttcttagacaatctgataaattatcagatctcacttttggctctttttaagacagttatgcctcagaaatattaataaacccccaagcccttatactgatcagtatgttcactactagctatgagaaattcttgaagttcttgtaattattgtattatttccttactttcattttattagtatgtgaataatatttttaaaaattctagtgtatgtcttgtatatattttaacaacatgacttttaattaatgtcttgataacatttcttctagtgtatgttttcagtaacatgattattaactgtaactttaaaaacctgtggattagatgggaccattttaaaatgttttaaacctggaaaatctgatggctttaggtttagttcaagctatagatcacctgtggagaatggaactgccaaaaaaaaaaatagctgtagcagccctttgagtattctaaaatagggatgttatccagagcattggtttctaaagcttccattatttattgatgttgagctttcaggatttagctacaatatttactcaacatctaagccatgcttttttatcagtcatgttttatatcttttataatcaaactgcttatcactgaaaaaaatatataagtttctatgtatctggaagaattctctggtgtttcttagatatggattttgatgtgtggaataagaattcaattcaaggataacagagatgttgtcctgaaaaaaatcgaagaaaatcagcttttctttaacattctgtcaaagctcctgactattagtttatcagcactgttttgccaaaggtgtcttctcttctcttctttgaaaaaaatcatctgctgctgctacgccgcaagtgtgttcccgctgtgcctgagaagatgtgtggcataaaaaaatgggcatggcctgagttaaaagtgctacatttaagccagagctggcttatttattagttgtctaatcataggaaaatgacagagcatgcttttctcttgcaatatccgttgctgaaaattaaacacatgagcagagctttcagagaggttgactggcctctcagacagcacctcataggatggcctgtgttgaagcatctcctttaaccagggtctgtccctcagcattgggttggctcacctagattggattgtcccagcagaaaaaaaaaacccaaaattcagaatcatatccaaaccggaatactctttcattcacattacttgtactaccttttcagaaactggatacctgagtgtgtgagggtaacttagaaacttatctcatggttagaagttttagaattagagagcgatgatcatgaaacggacttcatgatcagaagcaatggagcaaggaatgagatgtctttgaggagtatttccctgaggctgtggataacgctgacgaataatccccaccttaaaagtgggttgaccactctagtagctgtaaggtgggagggttctttcttcagagataaatctgtgctcttcacttgcccatttcccaggttttcatgtaggtagaagaaacacctgtaatctgaagacactcttccttcagctttgttagtgacagggatttaaatatgtctttcacacattttccttagatagttaaatttcacttttcctgtttgtttttctctgaaggtattctaactcccctcctaatggacttctagagctttctaattctatgcaatttctgttgatttgttctggtaaactttgaaggtaatctctgattcaacttcttggagattctatcatgtcatctctgtttattaactttatgttactcatggtttcttgatgaggactcattaaacataatgtaagtagaaaattattaactacataatatttactacgggttgttatttctgatagtagctagctgtaagattccaattgttcttcaaatctttgtctcagtgatctctgtgtagttcttgactacttcaaataacttcctagaaggatagggatttaataatctcttaataggaacacttaacacactgctggtgggaacgtaaattagttcggtcgttgaaagcagtgtggtgatttctcaaataacttacaaaagaattaccatttgacccagcaatcccattattgggcatatacccagaggaatagaaatcattctaccataaagacatatgcacgttgtgtatgttcattgcaacactactcacaatagcaaagacatggattcaacttaaatgcctatcaatgaacagactgaataaagaaaatgtggtacatatacaccatggaatactatgtggccatgaaaaagaatgagatcatgtcctttgcagcgacatggatggagccagtggccattatccttagcaaacttatatggaaacagaaaaccaaatactgcgtgttctcacttataaatggaagctaaatgatgagaacatatggacacaaagaggggaataacacacactggggcctactggagggtggaacacaagtggagggagaagatcaggaaaaataattattgggtactatgtttagtacctgcgtgagaaaataatctttacaccaaacccccgcaaaatgcagttcacctgtatagcaaacctgcacgtgtacccctgaacctaatttaaaagttataaaataaacgtatcttattttcagtacaatacaccacagagtagaagggttaaaagagattgcttctgaggaggtgagatgggggtaaggacagcacaagagcattttggggggtgatgaagctgttctgtgtcttgcctgcgatgatggctacacgactaagcccttgtcagaactcacagaactttacttcaaaaggagcggattttactacacatcaattccaataacaaatactttgtctttaagcaaagggatacctaaatatagcgtattgaatggatctccagaaaaacacatttttcagttcatgtttcagcctaggcctcatctcatccaggaaaccttgtcttgcttgcctttacatacatgtggcaatcagtagtttcttttagggctcggactgaacactcaatgaacttcaatcttagcgcttgtcgtagcagattgacatggtttatttatatgtgtcattctctgtagtaaaaggaaaggatcaaggccattcacttttgtagtgattgtgcatggcagtatttggcacatagtagattattaattatggaacttctgttttcacacacacacacacacacacacacacacacacttcagagctattttcatttaaatatttgctttagtctccaaagcccctctgcctcaacaccaacccttctatctcattattcatcagcttttctcctattacgaaactacttaggaaagcccacttatttagcttatgatggcaaaaataaatatttgtacttttttttttttttttagtcatcgcttcatagaacagcctctgtcctctgcttatgccatgtctgaatatatgctggaggtaaaaagagttcctggttgagagcttcaatttgagaaactatctgagattactttccaggttccaccgtggaacctgtctgaccttgaacaaatgacctcgaacaagtggctgaaatctcttctatttcgtcaactgtaaaatgggggaaaaccatgtctatctcatggggttcatgtgaaggttaagaaattgcttattcagtgtttagcacagtgcctgatatgcataaagctcctaggaatattagctgttattgtatttccttaaagaagcccatagctctatatgccctttcattatatgttttagtagcccaatttaacatatggataaaatatttttaagttaaatgatttgctaatggattgttgaacgagtggcagacacccatattatagacgaaggtcaagtccataacatacagtacatttccccactttcatttcccattaccaaaattcattattctcctgagaaactcattatagaattcatgtcagattcatctgtgtgttcccagcagtgccttatatccagaaataacactgagtcattgtctagatgtagcagaggtggaatcctccaaagagaagcctcagagtggccaggtttgccaagtatagggatgccttgattactggccttactctttatgctcgtgaattcctaagttttattcctcctgtagtcatagattggcttttaagctacaagctgaagagagagaaaacctcttccacctcgttggaatatgtctcttcaatccatttgagccaatttaggacatgagactgctcttagtctagaaccagtcatcaggagaattccaggtctgattgactcggactagcgggtcaatatcagggcaaaaattccaacgcacaacacgatgtatcagtaaggagaacctcaaaattatttcttaacgtccagatcatgttcctatttttatatatctattttctcacataagtcattaaaatgatgtacctgtgcgggtcctttaatgatactcaaagatcttgaattataggctaataactaacttaataagctgcagaaattaacatttctgctacgtttatgtagcattttcccacatgtacttcagaggcttgagaaaagaccctgaaataatgactgaataacagctttactcacttaatttcaaatttgttaattcttctgggaaataccgtcaacatccattttattatttttctcaattacatgtacgtttctacatcagtggataagttaaggagaagaattccctcatgataattttttcatgctcgaaaattttgaatcaattttttattttacattatactctttcctagtcattagaaagggagtggtggttaagataggcaagaatgctttataaggatactactctcgtttcaattcttaacatcaaaaaccttaacagtgtgtagactataaaataaaatatctagggatcagagcattgtgctgaactttgcaggttttttagtcaataatatatatgacgtgttcacagaattctttgtcaacaaagtacttttggagctccaggccatttaagttggtttttgtactttttctttttcttcggaagactttttttgttctatttacctggaagtgtttcttttttggtactgtgaattaaaatgagaccaatctactaggcaggaaaaaaccttaattagattgttgacacagacaaataagaatgtcaattagcatctactgtcacatgcctctccagactgcttctaggatgagtggcctcaagcagctacatcatctttatactcctaaagcatcaaggaaacttggagtgacaattcatatcatgaacacatccacagtgatgatgattgtgcttcttcccccccacccaacaacaaaggatgaatgccaattaatgtattcagttttttgcgtcaaaggctggatcacttgtgcaatgagggtaatcatcctgaccagacaggccatacaatccatattgtgtgaattaaagataatatgcgtgaaacaccttactctggatgtggttcatagcagtagcaaaaagatgaaaactatggtatgctaacattttagagatctgtactctattttaaataattttataaaagtgcatatacaataaaaagtgcacgtatcacaagtatatgcctcaaaatctaaagccagtcatgtaatcagcatccacttcaagaaagaaaacaaaacagtacccctggttcctctttgcaatcattagtctcccaagagtaatcaccgatctgatctgtgacagcatagattggttttgccctactatatttttgctgaattatacaatatatgctctttaatgtctggcttcttagtgcattgtatttgtgtatcagctattctcttgtgtgtagttattaaacaatcattttatgggctgcataatattccatagggtaaatataacagttttattgataacttagctattacaaatagtgctgttgcagacatatattctattacatgtcttttggtataagaatttacacatttcacatgggtgtatacccagaactgagattgctaaatattggggcacattgtatacattttgatttagtagataagatattgccagatatcgtaaatgcacagtttgataaatatagagatttatactttttctagagaaaagccatcaatatcagtgtatgtgtatatatatacgcgtgtgtatatatacgtatatatatacgcgtgtgtatatatacgtatatatacacacatatatatacgtatatatgtgtatatatatacgtatatatatacacatatatacatatatgtgtgtgtgtatatatatatatgaaacaactcagaagcagaaagataccccatgttctcacttataagtgaaagacaaataatgtataaacatgtacacatggacatagagtgtgtagtgataagcattggagactgaagtgtgggggtgtgcaagggaatcagtgataaattaatggctacaatgtacataatttgggtgatggatacactaaaaatccaaagttcaccactatccaacatactcacataataaaattgcacttgtaccccttacattcatacaaataaaaaattatttaaataaaaataaatatgtgtatatgtatgcatacatacatatgcatatacatatgtgtttgtgtgtgtgtatataacttacacttaaaataagcatggatgctgcaatgaatgctcaatttacaagggttgtccatccaaacttgtggcaagtatctcacctctcaagttgttttcttttttcttcatatatttcttgcttttgtctaggaaggaataatttggcttgcctttcaagagtgtacagtcagcatgataacccaaacacttaagacacgtgctaacccatgtggatcccttgagagaaggaaaacagtggtccttttactgggcagatagagcccggggccaggtttcgtggcttgaagatttcagcttctctgcgcctctcagctcagtgcctctggaagcaatttacaacttgtgaggccatactcaaaggccctgttattaattccccgccttccgagaccccatttcagaggatctcaattgctctcagagtgaatttactgtttcctgaattccgtaatcccaatagcaggtctgttgtcctcattagatagcttaagttagagtcggcagtgtaattggcaactgagctactaagtatccaatgcttatgtggaaaatatgttccctattgcaaacaactgatattcatattcaatttggcaccatcatctatctataaagcagatactacttgtgtttattaagttttatcccaaataattattttagtaataatgcttgaaaataggccttggtcatttgcatgtctgtatatggcatatcctgagtctttgtatgtattagaaagatcactcgttttgacttgatggtttaataaaagatgtccctcactttgggcagagacatttgaaaaaggcactccaaccagggacctaagaggtgaatgagatgcagctctgaatcaggtcacacggcctcaggaaggaaacatcttggttttcacatccctcacttctcgatgtcatgtgcaatacacaaatgacccctcaacacacacacaggcacatacacaaacacacactcactcactcactgtattgtctctttccttgactaagtccttcttactaactcaagctctaaagcttttttacttacctaaggtgagtgtgtgaggatttgaggtttcaatattaaaattcagaaacatttaaagttcattttaaatattagtaaaaaaaaatcttgacaaaatacaattatagacaaaaagaaaattcagaatatttggaatttaaggttgaggttacagccctatttatgaaatattagaagaaaaatgctggagagaataaagcaggtttatgagtctgatagaaagcataaccagatgattatgcatatatttgcatatgcaaagctttctaggcaatctgaacatttaaacctacaaatgtggctgcgatgaacagccacagaagagcaggctagaacagaagaggaggctagaacagaagagcaggcagaagttgtaaatgaaatgttaattttcaatggttgatctcccaagtactggaacagatttgtgctgttttcaaggttttggttcaaagaatccagtagtgtattgaattgttttgtggcacttccctgttattttgctttgtaagctacctcaatccatgaagtggctatgagccccttatacaacactgttgatttttttttccttatctacgcaaaagatttttgattcagggccaggcatggtggctcacgcctgtaatcccagcactttgggaggccgaggcaggcggatcatgaggtcaggagatagagaccatcctggctaacacggtgaaaacccacctctactacaaatacaaaaaatcagccgggcgtagtggcatgtgccggtagtcccagctactcgggaggctgaggcaggagaatcacttgaacccggtagccgagatcctgccactccactccagcctgggcgacagagccagactccatctcaaaaaaagaaaaaaaaaaaagattttttattcaggtggctatcagactcattaaatagaagccttaggttaagttcacgggttgctagttggaagcctccatggactatgttcataaaataatagaaaggagttatgcaggacttcttgaaatgttatttaaaaagtcagaataggctttctattacttgtctgaggtcaaatacatgtagtgctttctgaccatttcatccagggtgttagctaggacaataagaggtgcttaaaaattattagattgagtaaatgagaaagcccttagaaacataggaacagaatgacccttgctttggatctaatattgactcccacgcctaaatccctttggagaactcctttattttctcttccatcaagagcaggtataaattaaaaacaccattaaaggggccatctagctcagctgaagctttcatcacacatgtaggggaggtatggttgggagggatctttttatcctttaggtcttcaatttacataggacttttgaataatcaaatagccccaaagagctgatcttaggactagttgtaattgagactatttctccatggggtagaaaaatctagttgtaggaaaactgagaagtagatgtatgttaacctcaaaggctgttttttacaaaggatgttaaagcatcatctttgctcagaaagggagcaataaaacaaatgagtggaaataacaaaaggaaataatggccaggtgcagtgcctcacactagtaatcccaacactggggggctgtggtgtaaggatcgcttgaggctagcagttcaagaccagcctgagtaaaataggcctcatctctacaaaatagatagatagatagatagatagatagatagatagatagatagatagccgggcgaggtagtgtgcccctgtagccccagctactcaggaggctgagatgggagaatcgtttgagcccatgaggtcaagtctatggtgagctgtgctccctcctgccactgcactccagcctgggtgacagagtgagatcctgtctcgaaaacaaaaggcatactttttagatgtaatggaatagagtacttccaaacctggctgcctgctggagttgtattggaagaggttgcacgacttcagtggagatggcctagatgcctgctcagcagtcatctagttaaagcaactaagaacatgtaatatgaaactgcaaaaagagatcgtgtacgtaaaatcactctgggctcctcagatagagtaataaacacaactcctgacagccaaataaaaagagaaataatacagcccttgacttccttggttgctttgacatactaagtaggtgttacaggttgggttctctgggaaacagactctaaaacatttttatttttactttatttgttgttattattattattattattattttagacagaattttgctctcgttgtccatgttggagtgtaatggcacaatctcgtctcactgtaatttccgccttatgggttcaagtgattcttctgcctcaaactcccaagtatctgggattacaggcaagtactaccacgcctggctaattttgtatttttagtagagacggggtttcatcatgttggtcaggctggtctcaaacacccgacctcaggtgatccacccacttctgcctcccaaagtgctgggattacaggcgtgagccactacgcccggccagactctaaaataaagtttaatatgcagaatacttatcagggaatgcccactggaccaatacatattcaagagagggcttagaagcaggattggacagaaagagaagttgagctgtaatgcaggcccaataacagccttagtgttaagcaggctgagagattcagcagttaatgagacagtcaacccaaacagttttataggcatcaaaagtatgatcagcatggtgtcagtttcctgtgtcacttgtcccacagtatgataccaaaattaaagagaccagatgacatgcaacacaagcagtgtgcactctgttgttgagaagccaatttcgtcatgcaattaagcagttttatactctgcagctgtactttaaggggagctgagatggaacatcatatgtctcaccataaccagaaaggcagatgagaaatgttctatcgccacctcccacaaggtaagggacttccctaaagatacagaggtgggtggaatattgccttggtagacttcctctcaagactgcctatcttcccatgttggaaggatcacagagcatttgtcaagacgtgggtcaatctgcagttgaactttgtgtatgtggcctatgtggatacttataatatcattgggcacctccatagagctgtttcccaattgaccaaacatatgggaagcttcagagcttcgaatgacccttcagagtagtcctgagaacagtgagccttactactcctgcattaatcagtcattggatgatagccttctcagaaataagtcatgaccttgtgcaagggggctcttcatggctgggaccacccctaaaactgagagctgaaggctgtctgccaccagcccttccacctgctgggacaagttctttattgaagggaaatctgagtagttcatcagcgtccatcacagtagtcaagccgttcattcttccttcttatgacaacattgtgcttattgttatgtaatccctttccagaacattttaggttaagttttaaaaataatgcatataaatagacaattcaaatactggggaaaaaaagcttgcacttatattgttatagaaatgtgcacacttaaagagctgatttcttctgggtatttacataactttatttaaaaatccatccatttttaattagctgtttttaatatgcagttagctaagatattataagccatatattaggctaatggacatttaacagcttagttaagttcttttaatggaaatgctgacaaacctttgtctgtaattatagcaacactgtgattacagaaggaggtgcctctccttgttgtttgcagccctaaaattccatgtggctataagtaacaaagtccattattagataaacacaagtcatacttggcattacttgcattactcgtctccttgctttatttgaatcattttttaaagttgtaaaatgtttttcaaaactcagaatagtggccagttaataatatgattcctcttatattatgagattttaaaaaatagttcaccagtttctggtggcctctatacccattggcaagtcctagccattgtgaattaagtaaacaattctttatggaaattttttaatccttaaaccctataagtttttattcatcatgtcaggtcacttgtcaaagggtttaacattcagaattcaacaaaagtttatcaaacacctattacaggacgtgcaattttgggcgcactgggatttcagcaattaacaatcaagatatgatttgtatcgacatggatattacattctctcacaggagacagaaaacaaaataactagaaaatatacataaagagactttaaaatggggtaaaattacagattgtgacaggatgaccactttggttcagaatatctaggacatttttttctttttttttcccctccctccctctttcttttttttctttttctttttctttcttttctttctttttctttctgcctttcggagtcttgctctgttgcccaggctggagcgcagtggtgcaatctcagctcactgcaacctctgcctcccatgttcaagcttttcgtgtgcctccgcctcccaaataactgggactagaggcatgcaccaccaggcccagctgatttttgtatttttagtagagatggggtttgaccatgttgcccaggctggtctcaaacttctgacctcaagcgatccacccgcctcagcctcccaaagtgctgggatttacaggcgtgacccaccaggcccaagcaaggacatttttttctgagccatgttatttaaacagagatctgaatgacaagaaggggccagctctgtgatgtaggggaagaaaaatatgttccttctacccttctaggctgcccagctggagtcctacaaagttagagtgacaaaagacagattaacaagaggaaaagcctagaagtttattaaaatattcagtgcacatacacctggtagaaactcagtgatgagtaactcaaaggggtggttagaatgttgggtttatatagcatctgaacaaagaacagtaaacttgtagagaaatgacaaaacaaagaaaaaaggggtttaggtatttagggttgccaaactgtaggaaggtaaatatatgggagaaacatggagtatagtttgtttatgccaagtctatcttgagatcaacttttcgtattcttcatggccataacaatttcccaggagagagggcttatagcagttatcatttctcagaagtttctgcttttatttagacaagggaagcactgggaaggcttctttttgcttatattgattcttacttgcctctaactaaaagtaatctttatgtcaaagtgccatattttggagtggtatatattgatctcctataataacaatcaaaaggaacagtattctaggcaggagtaccactaatgcatagtgtttggtgtaaagacaagttaacatattcatggggcaacaacaacaataagccaatatggctaagacattgaggatgagtgagttggagaagtaggcaatggccagctcatataaagacttgttcgtttttataaattgtttagattttattgtaattatggtggcaagtgattggagagtattagcttcactttgactggcttatcgaaaacggaatgtagggggtgaaagtggaataaaaagaccagtcattaattgagtagtccgtgtgagagatgatagtggcttggacaaggacgattgtactggagagattgaagcgactgatttcagatttgtagtcaacaaggcttaattggtaggagaaaaaaataaatcagtgttaactctttaatgtttaacttgaataattatgatgagggtattaccatttattgagatgtagaatattataaagtaagagcagatttgttcaaaaagtatcaagaatctttatttggacatgctagtttggggatgcttattagagaccctaggaaactgaatataaatgtggattttagagaagagcttagggctggcagatgcacattaaggatctgtctagagccatggcgctagagacctccaggagaacataaatagtctcaagatcaagccctgagacactcagatgtttagaagtggaacagaagagggacatccaatatagaataccaagaattaggaggggaatcaagagagtgtggcaatatgaaagatacaaaaagagtgttgaagggagggagtaattaataaccagcatgttatgaggggctcagtataatgaaaagataagtgactattggatttggcaacatataattttttggtgatctggacaagagcaatttgaacagaatgatggatatggaaggtccagaggagtaggctgagtaaataatataaggtgggaaaatagatacaaagattatagacaactttttcaagaagttttactgtgaaggggcacagcaagctgagacagtgaggataaataatagactcaaggatggtaactttagaataagaaatttcaatctgatgggatttaagtgttagcaaggaagctttaagaagttattttccccattagaatgatctgaaaaatgttttagaacattcctcttatattctattttatcacatttatataactttcagagaattgaaagaggtattaagttattatgaaattttctgagattaataagataacaattataggatgttttcttttagttgaaatacacctactcagcctaatttttataacttcttactgaagtataatatacttcagtagaaaagcatgcctaatataaaggtgcagctagatgaatttgcacaaactgaacacatccctttaaccagcacttagattaaaaacagaaccttgatgatacctcagaggcccccttctgccccttttcagtctctccgtgctacccccatggataagcattatcgtgatttctaataccatagattaattttgccagtttttgaattttatgcaaatggatctatttcacctaattgtaaatatataacattgtcatagcaaggcactcattgccttacactgaaaattacattgactctttgccacaagcttagacttgctttctcattttattatcatcaagcctatagctttcacactataccttgttcctgctcttccctactctatttcttggtagatattctatatcagtcttagagtgcagtttgcagaacccctccatcagaatctcctagggagcttgttaataatgcagattcctaggcccctcccatggtttatgaatctgagagtgaggcagacaagactataccctctcatgcctctataatgtaataatgtcttcctagaatgttctttgctgcatctcttattaaagaaatcttatgggccgggcagggtggctcacgcctgtaatcccagcactttgggagcctgaggcgggcggatcacatggtcaagagatcgagaccatcctggctaacacggtgaaaccccatctctactaaaaatataaaaaattagccgggcgtgctggcaggcgcctgtagtcccagctactcgggaggctgaggcaggaaaatggtgtgaacccgggaggtggagcttgcagtgagctgagatcacgacactccactccagcctgggtgacagagcgagactctgtctcaaaaaaaaaaaaaagaaagaaagaaaaaaagaagtcttatgtttcctttatggccagagcacaacattgtcatgaagtcatctaaaatttcccactagaggtaacatctccttcccctgtctagctcttttaaagcattacctccatttgccttgtatcatagctgcttgtacacctgtctgtctttccgctgaggttataatcctctggagggtcatgactttgcattcctttgtgtctcccattagcagccagcacagtgccttgcatactgttagttctaaataacttctctctctctctctctctctttttttttttttttttttttttttttttttttttgagacagagtctcgttctgtcacccaggctggagtgcagtgcaatggcatggtcacagctcactgcaacctccccatcgtgggctcaaatgattctcctgcctctgtcttccagtagctgggattataagtgtctgccaccacgcctggctaatttttgtatctttagtggagacggggtttcaccatgttgcccaggctggtctcgaactcctggtctcaagcagtctgccctactcggcctcccaaagtgctgagattacaggcgtcagctgctgcgcgcatccctaaataaacttttttttttttggcatgaaatctgtaacactggaaagatgttattgccttagaataattaagagattaaatgtagaatctcaaaaacattcatttttttccatgaaaactttaccaggcctcaagggataggaaaattatgggtacagaattgagaatctgtaggaacttgcaagataaacaacggtttcacaagaaagaccttgttggagagttaaattttcagacagttgtaataacttcacattaaagttttgtcaaaaaataagtatctgcatgttttgtttgccttccaatgccctcattttatttgattttttcccataagtaactatagtgaaagcacgaaaatgtgtttctgtgtttgtgtgcctgtatgttaattgtgactgtttctattgcattgttattgcagaacctaggcacgcactctgtaggcttgggtgctttctccaactgaaaaaaatcctacatatggataaattatttttacagccagtgtttaattttacaagtggtccccctccttctgtttttaggatggcagagagaatacatatttacttaccattatcacttactcatgctttgagcttgaaggaaatgagacagaaaaatgaagtaacattaacttctctctggaactatgtttctcatattagagctttatctgaggagttcacttcctctctcttcaatgctttgttcctctccagtcgattcaaatgtcctcttaaagcagaagttccgaacctctttctgtgacttcaggagagcatgagaatgtaaatataagttttaggactaaattttcaaagactttttccactcagctctcttttcctcttcggtttgttgttgtcgttgttgttgttgtcgttgttgttgttgctgctgctgctgctgtttttccccttccacttccgtaactgagctcttagggtccatctggaatctgattgcaattaaaaaaaaaaaagtttatttttacctccttgtacgtgctttctcctaaagcaggagtcagaagccttttttctttgaagggctagttagtaaatattttaggcttgtcgtctttgtcgcaattactcaactacgctgttgtagtatgaaagcagacaatacatacctgaatgagcatggttttgttcctagcaaactttacgcacagagaaatttggatatcgtataatttttatgtgttgcaaagttgtattattcttttgatttctccccaaccatttaatatgtaaatcccattcttagcttgtgtgccatacgcacacaggcagcaaatgcgagttgtcacacaggctatagtttctgactttatgtcttaaagtaaacagtaataatcattctctttttccaaacagtccactaatctccctttgtattcagcccttgcatagtaaacgccgtttcttcatcatcctgatttttattctgagaaaatactgtatattgttcccatgcactagggttcggggaaatttaaaaggatgtaggatctccttttcattggtcctaaaattgcactggggaggcaggtcatgtttatgaacagataaatagtatcataatataatcatgcatttctatggctagcatttagaactatagcttttgatgtcatgtggtttttatatggttgattatttttttcttatttataaaatgaaaaagtttgagaatttttcatctccttaatgtattcccttatttgagggaaaagtatttacctactacataggaatttatcttaaaattttctttgtctatctatttttatggaatataatcgagcaactattttactaattaatactttaatatcattatgaaaatgttctcatatttttaaccttataagatcagataattgctatgccaatctatggttgaaatgggttcttatacttaacgctatgctctttcttctgagatgtaaaaatatgtttaaatcagaatttatataggtgtcaattcaaaatgacagtagttcattattttgattagtataaatgttcacaactaattctattctcttatctattaagtcaccaaataaagtatatttgttttaaatatttaacagtttaaattattctttgaaaacttatgagtctaaagtaagaacaattaacccattcattttgcaagtgggatagttgaattttacttgcaatccagggatttttgacagtttgaaatatacatacataccatgtatgtttaggaaaacatttaaaaagagggggttgtaaaataataatagttcttccatgattttttagccataatgtttataatataaaatatgtatactcttgttattgaatgtagtatgtttctaatttaccagaaggcaagagaataatcctggagaatttctcaaggcatcttcgaactctttgatttattgctcacatatagtaatttgccaaatgacgccctagtgaactgaaagaattaatgccccgtcctaagtcactttcaccgagggactgaaaacctgcagcattttgccaattagaggaggaaacaatctaccttgcagagtcaggagtactggataaaggagctaagagtgttgctttttttccccttcttactttaaaaatcccaattcatcccatgtctttcttaaaggctaagtgaagtagtaagtacgtttttgcaacatacgaatttagcagactggccttgtgtttatttttggccggaaccattacacttatttccaaccctctcctttatttgttggttgataatgggctaattttgaatctttactgtcaaaagaacattaagagaagcagccctgcctgcatcgcaggctatgtctgtcctttgccgagtattaaacactaaaaaaaaattaagaaaatactaacaaaatgacaaagcattaagaaaataaaactagatgttaaaggaaatgagaaaataggaaaggatgctgtacctggagtgattttttttccccaggctacctaagatgatcaaaaaagagctaatttctcttaggtttctattaaggaattactagaatatcgggcacaccaggaaactttatcagtggacctgtcctgaaccaaattttcttaatgtatatatgataatttgttaccacatcccagattattttacaggaattaaaatatatttgaaacactgacagggaaaattgggtaagacattgatagatactacaatctgtacttgaaactgcactcaaggaattcgttagtcaagaaagaacacaatgactgtgggcccctctgggttttggaacctcttttgtaaagcatttttttttttcccaaatagaagatattatttttgaaaaggttaaataaaaaatctttgttcactatatagtttcctcctaaggagtaaattaatttatataaaatattgcaatataaataacaattttaaaatctcaaaagagcagtgttttaaaaataatgtagaaacattaagaaatgacttcaaatgataagaatgtcattggagagcaaagggtttttaatattacatatcgtggcacgtatatcagcacccaaccgctcaagatacagagttctttacaaaaatcaaacagaaggaaatgtgccaccttgttcataaactatatttaataataagccaggcagataaagtcactttcacaaataatgagcaagcccatggtaatataattcatttacaataagatttatctcatggaattcttagactgtgctttgaaatttaaataattctgataaatgccaacagaatagagaaatcaattccagagcaattactaacacgttgcattacctttctaacattaatatttctcttcatacatatcattgaagagaaaatgaggatggaaaataaaaagatcaggtaatatatttgctttctcatctagggttgttatgatcttcaagatgaagttttattttttactcctagcaaatgatattcttttttattttagtttttattattttatttttctgtaaattattggggtacaggtggtatttggttacatgagtaagttcttttttttgatatttctgagattttttttttattctactttaagttttagggtacatgtgcacaacgtgcaggtttgttacgtatgtatacatgtgccatgttggtgtgctgcacccattaactcgtcatttagcattaggtatatctcctaatgctatccctcccccctccccccaccccacaacaggccccggtgtgtgatgttccccttcctgtgtccatgtgttctcattgttcaattcccacctatgagcgagaacatgcggtgtttggttttttgtccttgcgatagtttgctgagaaaaccacgaggtaccatctcacgccagttagaatggcgatcattaaaaatcaggaaacaacaggtgctggtgaggatgtggagaaacaggaacacttttacactgttggtgggactgtaaactagttcaaccattgtggaagtcagtgtggcgattcctcaggcatctagaactagaattaccatttgacccagccatcccattactgggtatatacccaaaggattataaatcatgctgctgtaaagacacatgcacatgtatgtttattgcggcactattcacaatagcaaagacttggaaccaacccaaatgtccgacaatgatagactggattaagaaaatgtggcacatatacaccatggaatactgtgcagccataaaaaaggatgagttcacgtcctttgtagggacatggatgaagctggaaaccatcattctcagcaaactattgcaatgagtaagttctttagtggtaatttgtgagatcctggtgcacccatcacacgagtagtatacactgcaccatatatgttatcttttgtccctcggcaccccttttctaccccccaagtctccaaagcccattgtatcattcttatgcctttgcatcctcatagcttagctcccacgtatcagtgagaacatatgctgtttggttttccattcctgagttacttcacttacaatgatagtctccaatcgcatccaggtcattgcaaatgctgttaattcattcctttttatggctgagtagtattcatatatatatatatagacacacgtacatacatatgtatatataccgcagtttctttatctacttgtcgattgatgggcatttgggttgatacttgcacacacatgtttatagcagcataattcacaattgcaagtgatattctcaggaagcatgatgtaagtgacagagacttactttgtagactgcactcattcacttgttctctgaatgtgctctaggcagcctgagtttctactatgtcagtgttacatagatgagaaaccccatgggtggtttccacagaggctgcaatactatttttgataccaaaaatctgtttggttttgtgagccccagatgcccatatggaaaactgaagtgttgatacctctttgtagccctctgatgaactgcatggttcaccttcctcagcagtttgagcggggtggggagagcgcctgcttcctagccatccgattggcctgaatcatcaaaaatgctatcatgaaacaggttctgtttatctgctccagattacacccatcatgttctagagtgctggtttcatgcttgaatctagatcaagcctgctttcctcccctgcctgtactccctgtggctacctacagtcctgctgctgacagataatctaaaccaatagcacctaattagcctatttgctcatgtgttttttccatcgtggtataatgtcctccttgtcaatttagggtgaaaatgtagcaacacgttgctgatggtttaatttctggaatgcaggtaatgaatgtgtttttgcttatccaagtcttcccatcagatgtcaaatatagaagaacagtgttcagaggtcctaaatttaaattggagtgagaaattcacagcgcccctgaactcaggcaaaatgcactctgacaagtcaaccagatattcacagatggtctggaggatttgaagcctaatttggtgaaataaaattaaatgagtgaaattgtatgcagtcattaatctatcaccatacttaaaatgcttcattgaaatttcttttactgcttcaaatgaaaaaagatcaaactatgttatagaaaagcattcaaaacccttacataacatagataaaacttggttggagacttacagaactttctctgctgcttcgagaaagttacagtgcccacaaatctattgctattagaatattttattgtattcaacactcaattctaccataattatgtatatgagaaaaatatttttacctataaaataattattattaccttttaaaaatctgacattcttccttttttctaaagaaacatatttagatttagcttttattttatttttgtgttgatacatagagattgtacatatttctaagattctagtgatattttgatacaagcgtataatgtgtaatgatcaaatcagggtaattgggatatccaccatctgaaacacttatcatttcttcttttcaatgccatcataccaaaaggaagtaaatagaatttcaaatataaggacagccatgattttacatacatgcctacgattccaccacaaaccataattacgtcccccaaacttttaacatttcagatactttgtcccaggtatttcatgataaggattgggctatgactctgttacagaagggccaaatgactaaaatgtctctgaacaatattgattgcaaatattctacccagttgtcaggtcaatatgttccaattcggaatttataacattgtatctctactcccaaaccatccaatctcacctacctcacttccatattatggtgggtgatctcagattatatttaagctcatggttacttgtcaagtagatatggagtttagcctaacttttgaaatttatgctgagattacccttctcattatagaattaagtaggcagtttccaagtttagatttagcaggcagtttttttcaaatcacttaaaagttatatttttttagggcattgaacaggtttgaaatcctaccaagatgtcatgtacacatagaccaatagaacagaatagagaacacataaataaaactgcacagctacagccaactgttcgtcgacaaagtcaacaaaaaaataagcattgggaaatggattaaagatttaaatgtaagacttcaagctataagaatcctagaataaaatctgggaaataccattctggacattggcttgggaaagaatttttgactaagtccttaaaagcaattgcaaaaaaaaaaaaaaaaaaaaaatgacaagcaaggacttactaaaataaagagcttctgcatggcaaaataaatgatcaacagagtaaacagacaaacaccaaatgggagaaaacttttgcaagttatgcatctgacggtggtgtaatatccagaatctatgaggaacctaaacaattgaacaaacaaaaatcataaaacatcatttaaaaaatgggcaaaagacatgaacagacatttctcaaaagaagatatacacgcagccaataaacatgaaaaatgcgtcacatcactcatcatcagagaaatgcaaatcaaaaccgcaaggagataccatctcacacccgtcagactggctttgttaaaaagtcaaaagacacccaatgctggcaaggccgcagagacaaggggatgcttatacactgttgttgggaatgttaattagttcagccactgtagaaagcagtttggacatttctcaaagaacttaaaatagaactatcatttgacccatcaatcccattactgagtagatatccaaaagaaaacaaatggttctaccaaaaagacacatgcactcacatgtttgtcacagcactatgcacaatagcaaagtaatgggatcaacataggtgtccgtcaacgttggattggataaagtaaatgttgtacacatacaccataaaatactatacagccacgaaaagaagaaaatcatatcctttgcagcaacatagatgcagctagaggccattatcctaagcaaattaacataagaacagaaaaccaaatactatatgtactcagttatgagttggagctaaatgttaggtacttatagaattgaagatggcaacagtagaaactagggactaatagaaggggaaaggaaagggggagacaagggttgaaaagctgcctattgtgtactatgcttactacctggttaatgggatcatttgtatcccaaacctcagcatcacgccatatatccaggtaacaaacctgaacatgtaccctctggatcttaaaagttgaaaaaaaaagatgtcatataaatattcgtggtcactaaaagtatctaatgtattatacataaaaataaaaattgggtgaattggaagtgtattctttgtatcaagtcatgtcggagatcctattctgctttgatcacagtgtgaattcttttgcatttttgttaccagtcacttctttatttattgaactaataattacatattctgataatctgtcagaaagataaaaacattctttgtccatgtgtctgaaaatttttaacctatttttctaatgttttaagtgagaagagcatgttaatactgaaattgtaagcagtagactgaaaaatcatcccaatccatgggttatatattgaattgcttttaactgtattactaaatattaagcttaatttattttatttctacatatccccatttccactataggtgatttgtatgaatttaggaacttccttctctcatccatttttatattaaaactcagactttctaaaacaatatttctatccatccatcgttggtaactatgtactgacatgttttgtgcatccgaaaaatgttagcattagtttgtgcgcacagaagtaattccagtcaccatatgatgagctgatttatttatttcgtaagtgtgttcattattattatctcttcagcacccaaatatataggggacttaatgatacctacaagtaaaaacggaagacaaaaacgccctgctctctacagaggttaaaatgtttttgcaacagggctctagatctcagctgtgaaagtagggacgagatgaggctaggcatgcagtgtcagtataatacaatataatcaacatgtcagcatctaatgcaggtgttgcaaaacaaaatgtacacatgggtagtcaggtaacagaaaagcatgaagtagtaagggctatctatgcaagaggttccaagctgactatatactgaaatatttaaacactatgtggggcaaataaaatggacattagaacagttcgatggtcagttggggacttctgctctttcttccagtctctgaacatatcttaaagccacaatcatctatttttatttattgttatacatttatttataagccagcacccctgtgatttaagttctgttgaaatgctgagttggaaaagatcgatggatgggggaaatttagtgcagaggttttgccccaggttcaaaatcctttataaaatattaatacatggaacaaatattgaacaattaaaccactgataagttaatcaatctgattcaaagtacacctgtgaagagggacatggcaagaaaaatattacagtaagaactagaaacattccttcatggctgcttgatatggatatgtcatgtttaagaaaattcttctttagactgttgagattttttttcctgacaaagaagattcactgtcgaggaaagaaagaggtactgtgaaatttgttattgaaaacatgcacatacttttgtcagaatgagttaaagagtgaacaaaatgtgcctattacttacgtgttgtgctgttttaattcaagattaaaatatttaacgtccacagacaagaccacttttatatgaatattatttttctgctttattgctcaattttattaccatttcaaaacacccgtgttgctttctatggccaaagatgtttagcacttttcatggttatacttctgtacagtccaaaatacaacacttactttacacatacacaaacatccaatgtattttgttttctgtcaagtaaagacaatgtctgtgttattaagttaaatgtcactttcaaatacaggatatgttgatattagaatgttcaactttatttcctcatttaagcaaattacagtgtgaagaatgtaactgcagcaatttataaaaatcatatcacattcaattatgagagcaaacttgttttgtagacttgaactagtttcaattaatcttggagttatcatttcaaaaattctaaacagagagaaatacggagtgtaataatggtaggtctttgggtaagctgcttccaggaaaagaaagcaattatatatgttcacatagcactgacaaggagaaacaaaactttggacggcaaagaacttgcattagtctttttgacatgttcctgtggtgtgatttattacgtagacaatcagctcaacttctcaagtttgatatccttggaatcatttgaaatttaaattttaatgaaaattcattaattccaaggccaaaagaagtgattctaattgcttttgagaatcagactatgaaagaattctttggcaaacttgcactgtcttttctcttttatcattggttgcttcgtaggtacttaattgaaggtcctctgattatcagcacgggctgacatcagttcactccatgcattttaaacagtaggccagatgtttaaaggatcagctgaagcatcgatagcatgctagggtgaataataaaattttcattatctacaagaagcaaataaaaagcataagcattttcccccattatcctgaaggagaagatgaatgcctaagcaacattttaagaatgggttgagtgtggcctgtgggaaaatttgggtagaaaacttgtagttagctaatgtatatactgtttgcctctttagctcaccatatacccacacacatgggcatgcatgcatacagacagacacatacaatacacacaacaaacaggaaattcagatatactgaagaaatgtatttaagggattactaagtttttgtaaataaaatcctttaagatgctgagaaacaatggaagagaagtaggacatgatggctcatactttcgtaatttacttgtttaacgtttgccaaggtttaaattaatgtagatgtttttgtggctaggattaatgatctaacagtttggaataattaggcacttttatcacctagaaagcccagaaacccagcatgcaaaaattctggtatgtctgcattttacacttagatataacagagaaatgacaagtagtcaagtggatagagaaacgaatgattcttcacacatgcacacacacatagaaattgtctttttaatagtattttaatgtaacacatttatgcataatttctccatagtgtttatcttatagtgaatatgtgatgaatagtctctaacattagtggttttatagattaaacataattaaggctttatatattaaagagtcaattggtgacattctaatataaacatgtttatctcatatacattgaaatattagataattcattcgttgagaataaatcgaatgagtcaaaacttttaacctccactttgagctttgtaatagtatccactgaaaatattcatgaaaatttttaagtcatttctatttatatattcagtccaaacatctcacaagtttaaaatgtaaactcaagaatataatttctgtattctacaattggaagcatccatcatatcagatgaacttatatagtttgtgaaattttgcaaactttctgtttagtaaatcttaatgtcaaacattttaacttccaggttgtctttcttttcagttttaatatccgcgatctttgtatactcgttgaatggattctcaataagtaacccacaaatatatatacatactatgtacctacaaaaaataataaaaagtaaagaaatcgacacttatccatacctgtcccatagtaataaactattcataagtatatttgaaagatatgagaatcataaaagttcgtgtttgcacccttttgtgcgtggaatcctaggtttgcattttgtggatctagactttttggagtgtggaaataaatgaaacaaataatcgagacccagtcttatattcaggttatcattttactacataaagcataaataacatttgcagtttgtttctatggctagctctaaagtcttagcaacgagaacattatagaaagacttcaactgtagcttccagcagaacttctgaggttccgtttatggactaagcagcagttgagggggacaaaactcataggcaattgatcactccaaaggatagattgtcttttctaacctaatcaaaagatttatagtgaaggcatattcagattttgttgaaggatatggatatataatcatgtgtgtgtgtgtgtgtgtgtgtgtgttagacatacttaaaacattatttgagtagaaaattctgcacaaatggaaaagtataacatgtgttatatccacacatgttgagcatttacctggctgaaacatcaaaagctgaattgacttaattgaatgttgaatacttaatagttactttgtagtgactcactattaaaacattatctcaagctttgtcagaattaatttttttaaaaaactcagattagtgtcaggtttactgaaacagcagatctgaaattactgtgtttttttttcctttcaataatcagtttctaatccaaaattgaatatcagttccaactctacattcagtttctgttttacttgtttggactggcttttggttctgttttccacatagatcctctctgtgtaagacaaagccatttgtgcagattaaattttactgagcgtgttaacctatttaaaacattcatccaaaaagactagtatgaattcttcatatggcaagctgcttgttttaaaacttccatttattctaaaatcctttttacttatactttttaagaaacgtattcccgatatacaaaagtaacacatgctcattaaaacaaattaaaaatagtattgtataaagagctgatacatttctgccttgccccatttaactttcttaagtgttcatgtgaatcatccattcacatcaagacatttatctgtattcatatgaacgtgttttaatatatataacatatatagaattttatataaactttccttttaaaatagaaatgaaattatatgatatatttattctgtgtctagctcttgtcacgtaattattcaagaacatatttctaggttaatatctgtattcttaggtagcattcactaactcctcatctacttgttttcttccattctaattgtgtttaacatttcttcatacaattggttgtcatttggtcttctttcatggagggtgcataatgttcattctcaccaattctttacactttacataactgcttgatacgaagccagaccttataaatatcaacaaagcaggaacactgtaatcagctatcagtttcagttgagctgaatgaccctgaatatgtgtacacatattttccaggagattttaaaactgacacctcagatttctaagacctggagaaatcagcatgagaaacattgatctatattattccgtgaaatgatttcactaaatagtgaagcatctcccacatgtggactctgtaatttattagaataaagagttcatgtgcttctgaagaacttgaactactcttctggcctccgtacattggtttcttagctataggaaggctgagcatgtttttcctatgcgtttcctttctagctcatcattttagtgacaaaacaatctttcgtggtgttgctctagctatagaattgtttcagattcatttgaccaaaggtggcaaatacaacagtcccaacaaaaacaaaagacctattacagaatgatggaaatgaccccagggaacaatggcacctccacatttcttaattccaaggttataagcagtggtgtggacaattctcaattccaatgctgaatcgccttctaatttcaaatacctgtgctaaaaattatttacgtctactgaaataatgaactggaccccaccaggaatggccgatatgcttgtagtcagagcacaactgtagaaagaaaataacattttaatttatagaggtatgatgatagctgtttcatactgttttcagaacgatgaatggcctgctcagtagtttcttgtcatcgtactgagacactttaatttcttaccagctgagatgaggaatacgagcccagtgtgcaggtgaaattggttaacaggagccattaaaatttggaagagtcagaatagcatcaatcaaaatgctttcagtgtaggaagtaaacatgtactagcctgacccacctgtcttttcttttaggtatgttggtaatattacaatcattttgaggtatccataaacaactgcttagatctgaagaattgtatatctttctttactctgccctggcctggggttatggttctcattgagctctaacctttcagaaaaaaaatgtagagaagtggttcaagaagaatgctttatcttgcttcataaaaatgatagtgatagttttattgaaggcttactatgtgccaggccaaagtgcgttttattatcgttcccattttccaggcaaagaagctggagcacagagaggctaagtgagttgtccaggatggctcagctaacatgctgcagttgggatttgcacccagaccaacttcttttcaaccactgtcccatcctgtgtcttctctactcaaaaagtgtttcagctccaaacctgaaactttaaagaaaaggaaatccttagtggaaagactaggttttagtcacaaattatctccttccttacattatttgtctctttttcaaatactccaagctttgattaaaactgtctatcactaggaacattgtagaattgctaaggtggaattgttaaaagaactcaattccaattaactttgccattgattactgtgtgttctggaggggtgttctttctttcaggttaatgatgctttattgtatatctcaaagattaaaaataacaatgaaggaagtagcaaaccggaacttctctcacaatgcatctttcaatctcgtgctttaaatgaagataaaatcatggctgtggtaaggttgcaggaaggatgatatagattaagtttcttgcaaactgccctctgaattttcaatagctgtagaaggtattggttttccaaaaaattgacaaattgaggattcattcagcagtttttttctaggtctcttaccagaaagtgatcactaaaaagtgtagggaaaccactcaaagttggatagatcattattttcacttaagcattttaatttcttgaaggagctttataatgcaacaaagaatttacagtcctgtgtcaccgcttaaattttctagggtcatcagtaaactcagtggaaataaattagttcatgaatataattgacccttaaattctgtcactgtgcaagtaatcggtgggtctgctggatatggctttcgagcagacaggtcaacttcttcaaacagagaagaagcatagcataaattgaagacaaataacaaactacttgtttcctccttctttggcatcaccctatggatggagtatgcatttataatttaacacaatcaagagatctttattatcctacttttgggtacaactgcttcgtttctcttttgaatctctacagctatttaaaaatctgttttgtaaaattctttaaaaaactaaaacatcagattcatatttcaggtatcttactatcttataccaacttaagcatccagtattatcacccacccttcccctgagtgaatccttagcactgggctcttcctgttttatccctgtgcatgctgagctctttctggccttcaagtctacttccgttgcaactgttgtctgaatggtctctctatgtccttcttactctctaaatatttcggaatttaaagcctggaataatctaccttagtccaaaagatatgctacactattctagttcacaatgatctcacactgccgttgatacacaacatttaatatcaacttaatatctatttcagttcattacgaggtcacttatgctacatcttatattgttgccttggacttttattatctcttcatatatgtgtttatggtgctcccaccctcacgagaagttgcaaataccatgttagctgtctgatggctttctatgttgtcaggtataccatttcccaaccagttggcattcaatgattaagttcattaacaaagaattgtatgtgttgaaaaagatgtttttttcttaatgaagcacttgtttttatttttttaatgaaatccaccctcttaataaattttaagtgcacaatacagtattgttaaatataagcaaaatgttgcatagcagatctttataatttttttaaccctacatgcctgatagtctatacccattgcacagcatctcaccatttcttccctcctccagcccttagcaaccaccattgtactttctgtttctataattttgactactttagatacctcatgtaagtggatgcgtgcagtatttgtccttttacgacttgcttattttatttagcaaaatggctacaagattcatccacattgtagcatatggtaagatttcctttttgtggcagaatgatattccattgtatgtatataacatagctttatacattcccctgtcaatagacatttagtttgttcacacctcttggctactgtaaaaatgctacaataaacatgggaatgcagatatctcttcaagatcctaaattgaattcgtttagataaatatccagatgcgggattgctagatcttatggtagttatattttttatttttttgaggaaactccatattgttttccacaaaagctgcacaattttatatttccaccagcagtctacatctccaattttcctacaccttcaccaacacatgtaatgatcttgggctttttttttttttttttttaataatggttatcctaatccgtgaggtagtatatcattgtggatttgatttgcatttccctggtagttagtgatgttgaacatcttttcatataactgttggtcattttaatgtcttctttggagaaatatctattcaattcctttgttcactttaaaaattgggttgttcgaatttttgttgttgttgttattacgttcctcatgtattttagatattgacaccttatcagatatatggtttgcaaaccttttctctcattctataggttgcttttaattctgttgattgtttcccttgctttgtagaagctttttagtttgatatatttctgcttatctagttttgtttttgttggctgtccttttagcgtcatatccaaaaaaaattattgtgaagaccaatgtcaggaaatttttcccttatgttttcttctatgagtttcatagtttcagatcttatttttaagtctttactccatttcattttgagttgatttttatgtatagtttaagttaaaggtccaattccattctttgcaatgtgtatatccagttttcccagcaccattggttgaagaggatatcctttcccagttgtgtattcttggcacccctattgaaggtgatgctaggtttatttctgggatctctattctgttccattggtctatatgtctgcctttatgacactatcgtgcgctcttgactgaggtagctttggtaattcattttgaaactagcaagtgtgatgcctccagtttattcttcttcctcaagactgttttggctatttggagtcgtttgtggtttcatatgaattttaggaaatttaccttatttctgtaaaaaatgcgattgggattatgataggaattacactgtatctgtagatggtttggatatatagacttttaaatgacacatcagatgtatttccatttatttttgtcatcttcaatttctttcaacaatatttcatagctttcagcacacacatcttttaccttcttggttgggtatttactaagttatttattctttttattgctattgtaaatgagattgttttctaaatttcctgtttttatgttgctagcgtatagaaacgcaactgttgaatgatgactttgtatcctgcaactttgctgaatttgtttattggttctaaccatgtctctgtgtggcgtcactcttaagattttctacgtatcagatcatctaatttgcaaacagatataattttacatcttcctttccaaatttgatgtattttatttctctttcttatctaattgttctggctagtacttctggtacgattttgaaaagaagtggcaaaagtgtgcattcttgtcttgtttctgatcttaagggaaaagattttcagtcttttgccattaaatgtgatattcactgtgggtttttcatatacggtttttattatgttgcggtaatttcgttctattcctagtttgttgtgtgtttttatcatgaaagtgttgaaacttgttaagcgctttttctgcagctattgagatgaccatagatttttagcctttgttctgttaatgttgtgtatcacactgattagttttcataaattgaaccatttttgcattccaagaataaatcctatatggctctcgtgtataatcctttcaatatactgttgagttcagtttgctagtattttaatgagttattttgcttctatatttatcagcggtattgttctgtacttttctcctagtgtcttttattgactttgatatcaggatactgatgccccttgtagaatgagcttggaagtgttctcttctctttaatttttctgaagaatttgagaaggattggtgttaattcttctttaactgttcattagatttcaccagtgatgacatttggtcctgggcttttctttgttggaaggttttggactactgattcaatctccttactagtttcggcctactcagattttctatttcttcaagattcaatattggtagattgcatgtttcaaggaatttgttcatttttttctaggttaacatacagttgtttacagcagtgtcttataatcatttgcattctttttggataccagttgtaatgtctcctctttcatttctgattttacttatttgaattttcctttttttttttttttttttacttaatctacctaaagatttgtcaattttattgatttgtttttaaaaaaactcttagctttgttgatttttctattgttttctatttcaattttggcttttttctgatctaatcttaatatttccttccctctgctaactttgggcttagtttgtccttctttttctaagtctttgaggaagaaaatggcaaggacatgactttctttagcagttggaaggacaatgctgtaaatactcaaaaattaattatttttatagtgacaaaaacaaaataaaaaacacttcaaagcaaatgaaagtttatcatttaatttatcaaatcactaagcagactgcttgatcagagagaagatactcatatgatcacataaaactgaaagattaagaggtaaggacattcatgttatcattacatctaactttcttatttccaagatggagaaactgagggttggagaaaaagaaagatttctttgttagatacaaacagacaggactaaactcagtatagcagcctcctaaattccaaagtatcatgatactgtgattttatgcattcttcagaaaaatagtagagccactggattctggcaaagaagttatataaaatgtcaagttcttcctttgcctcagaaatgaagttttatgttccaaaattgattgggaagttctccttatacctcacatcacgtctactattttacattgtttacttttgaagaatttttttaattgacaaataataattgtacatattcatggagaacctagtgatgtttttatatatgtaatgtatagtgatcagatcagggtaattagcatatccattatctcaaacattggtcatttatttgtgttgggaacattcaacgttctccttctagccatttgaaacttctatattattgctaactatagtcaccattcagtcgtatagagcactagaacttatttctcctatctagctataatttatttttaaatatgctttttgaatctgttactataaattgaatgtcacatcgttttgaaaatattcttaatttatgctcaacaggcaagattacacacctgtgataatatctttaatttaaaacattactctgtttaatttaccagaatatggaaccctagtcattttagaggtggagcaaatttcagtgataatctagtgcaaatttctcatcttatgaatgaggagattgagtctgatataagggacgagattttcgtcaatgagcagcttgttaacattagctctgtgatagaacacaggcacttgtcctcccaggccggtgtttcttctactctatgatgggctgttttgttgtagtttttaaacagcagcattttcaccatgcatagttttcttccaaagttcgttcttaacgtttttgcacagaataactagattttggaagtagaaaaaggaaattctctttgcatccttgtatctctggttattttctttgtcctttgatctctctctcctcccctcccctcccctcccctccccttcccttccctcccctctccttcccttcccttcccttccctcccctctctcacacattagagaaagagttaaggtattaaagaatacataatactattaaatttccttcacatagagaaaggaatgaaaaaaagtgaaaaatggtcctcaccaaatgtccaaacttctgtaggtcatttccatagtatcagcaatgtcctgtatggtgcctcggggatatgtaagcaaatgagcaagtggttagctaattctagctttggcaaacacttgttatggcttacttgaggagaagtcacttctccaaagtgaaaataatgtgcacaggtcaattagaatttttttgtagaaaaggaaaatactttgtagggacatggatgaatctggaaaccatcgttctcagcaaactattgcaaggacaaaaaaccaaacaccgcatgttctcactcataggtgggaattgaacaatgagaacacatggacacaggaaggggaacatcacacaccggggcctgttgtggggtggggggagggtggagggatagcattaggagatatacttaatgctaaatgaccagttaatgggtgcaggacaccaacatggcacatgtatacatatgtaacaaacctgcacgttgtgcacatgtaccctaaaacttaaagtataataaaaaaaaaaaagaagaaaatacctccttatgctcctgacttattttctttttggttcctcagtcctcttctctctctctctctctctctctctctctctctctctctctctctctcacacacacacacacacataccccacatatacaatatgattaaggatatatgtgaataatgaaagcttcttgtgtatagatttagaagtctaatggacaaaatcaatattttcctatgtgcatttaattcccccctttgatttaggtatatagtctttttttaaaaaagagaaaaaaaattaggtgaccttaaggtatagatcctactttcaaaaggtttacagaactagggagaggaacatggacaagatttaaagaactattttaagcagaataaaatgtgatttatgaacaaagcatatattatttgtgcgtatgtgtgtgtgccaacaaagatgcaattaggagattgcacagggagatgtcattagaaccaaccttaacgggtgagaagtctttgaagacatttagaacatggaagatctctgacagagggaacaaaggcatagtgacaaaagtcaagggcatatttaggactggagagtggtatgtgtggcttgagagtgggcgagaaaaaacaacaatgcctctgtaataggaaagtagacagaggcatgacattaagagctttgccagctgtgctaaaagtagtgaacaagagctaacaaagtgaagaaatgtaccttttctgatgtgtatcattcccttattcatatacttcttgagggggaaattcattctgtgttgatctagtaaactactacaggaccaaatgataaaaagaagtataggaaagaatgtttcagcatactttacgagataacttccttgtagctattctccatagtattttgagcatcacaaagcaatgagctgaaactgtctaagccaaaattgacttgtcatctgttagggatgcttagatgagaattctacatttgagagcttcttagattcattgaccactatgtcccattctaagatccatgaatgcgtgacctaactattacaccttcttttagtctgattgtcaattttgtattttcaattgtgcaagtttctaaaactattttaggaagataaatctagcagtggtgtgggaatagacaagagagaaggggaaagactcttcaggaaactaaactcacaatttatgagtattctttattgcccaagtcttcccaaagtctttcatcaagaaagaggcattgcaactctccttttatagtttgtttttattctggagcagtgatgttttggtggagttgttcctcagtgcgtaattaaagggcctatgacaattacagttcatctcctgctgctcaaggtactgcagatatttggatctactactctcattcatttccaattaatgtcagctttagatttccttcagtatgctatgttataaaatttgattatcgttgtgcccaccttcccacttaatttcaagcaggtttctcgattacctgactaaactaatgaaatctgactaacccaatatctgtggacagtagtgtgatgttactgatttttgtatgattagtcaagtcatattcatgccacgttttcatatagtaccataaaggatattcttctcgtggtccttttcttttattctgaacatacaatgagaagaccggtaaagtgggctaggaaattaaagaaaaatacaaatggcaaaaaatatgggtcactcgaagtctagaatagagagcacaatcaattttgaattaaggggtgataaggtgatttggtcaggtgactggtgaaacaggaaagaaactatactttttgaagtgtttcatccatgtgttaagattcatttggggtcaagaatctaaatttcatatccctgggagtggaaactaagtaaaaaaaaaaattatggaccttggtttaatagctagaggagcaagagtgtatctttatgtgacttaacttctatgtgaaaagtgaaccttaagattaattattgggggaatttacttactcaggttctatgcctagatggtctgcccaactaagaaaacttattttcctgttactccatcctatttttcatacttttatactgcacttgcagaaaagcatatatttctacccaatacgaaaattcctgggaacatatttttctacatttcccaaattacttcaaaaagtaaacttaggttatttcatgatctccattacaatggacaggtggccttattgaatgttgtcctgtgaatacaaagatccagagtttaaagaacaaggtgtacttgcatctcccacttagggtttgcttgtggtggagagagaatctagtttgcttaaaaggatgacagtgcagtgccccaaaatatctgatatcattaaaagtctcatatttgtctttcgtaacttctctagggctgtcgatgacaggagacccttaactcctatgccttgattatgtgaataagcacatgaaaatattttagttatcttagttcacttttaaactaagtttcaattatcactagattctaaatatcatcattgagccgttcttaaggaactgattttctacatattcattcacttcacctatatctagtgtgtctactatttgccaagaaaaatttactctcttaattcagcattccatatacttaacatcataaaaagtaggccatttttagttttctaaattatttatttaaacatttctttaaaattacattctatcattacactatatttcaacactacagtaagcagcctattttgtgatttttccttatataaaatacataattgaaattaaaaatgaagttaccaagagccattttcactctggggaatgcacatttataaattatggggttattttttcttcatcagctttcatattattaaactttgtctcttcataattacagagatgactagacacagaagggaatttaacatttggtgtgcatttgtctaacctatactttatgttagaaaatacatttccatttgaaaaaaaatcagtaattgtgggtgtgatcaagagggcagcctgaaagtcgggtgatgtgactcacacctgtaatcccagcatttttggaggccaaggtgggattatcgattgagcccaggagttcaaaaccagcctgggcaacacagtgagagcctgtctctattagggggaaaaaaaaaaaaagaggaagttagcctgaggcaatgtaaatgaaatacatatttcaaggatatttatacatgattcacgttattcatataaagatgtgccagagaagactataggtacgttattttacactattttgctaggattttaagaaattcaatgtgtttttatttcagttaacttagaaaacttacctaacttatacttctcatggacacaaaagtttttaaagataggatcaaaaagcccacatggtgaagcattttgaactggatgaaaaacatctattatctttaaaattttatgatattactgattgtaatagactccctttttaagaaatcattccttatagaacataaggtttacatttacaatcaacaatttctatccttactacaataaaggcacatataaaaagtacagttgcatatttagcaggtttaattgtacattttaatgtagaaatcaattcaattctttcatttatcagcattattacagtgatttcaaattaagcataggtaactttgatatagataaatgatgtacacagcagttaaattttattttcaattatgtagtaattgtataacctaggcagtataatttgtaaactttgtattttattattatgcttctcccacttggcataagcacaacacttcctaaaagcataattttctatagacttaataactccctaaaaacctgttttggacccctatactatttgatataggcagaaaaaaaacataatccatgctcaaatttgaaaaatgactggtcacatttggtataatactaaaggtaaataaaatcaagagtctatgaacatttccggacctgcacatttgttttattaaaatgcataattgtctttagtgtgtttctatttgtttatactctactgattttaattaaaaataccaaaatacgtttattaaaaaactgtcagaatctaagttgttaaatatacttaactaggaaagtaactgtttaaacgagataatttatagagaaatgtggtgtattgccaattagatgtcaagatacaatacaactgataatgaaaaagtagcattttcttagggatggaatacagtgtaaggaacaccccagtaagaatacaaaaattactgaaaaaaaatcttccttcctgaaaaaccaagtgcccttcaagtgcagaacctcatccaactaattgttaggtatcactaaagcctgataccttcaattttctggatcattcaagctgtatttttgagtccttatactagaggaggtaaagagctataaaaacacttaatggtatctgatgtgaactgtggatcactttgacccatcacttctacgtctacatcttggataaattcccattgttgtcatagattgtacaggtttaatggtgcgtttgtggagggggctcgcttatagaaaatggagactctgaagggataaggaataaatgtatcacttcaggtcttttatttgaaattggggtccagagagcctttttgtatcagacttgtcaaaccatttccatttagtaattatatatgcactagcacttattcctacttacctcacctctttatgcccatttccttgtagttgcggttatgcatgaataatttattgcaccccttaccaacaatggaataaaacttccattctgaaagctttccatactcatttccaatagcaatagggtttttttaacggacgtattacaaatgtacgagtcagttgaacatagtattcctctttgtaagaactccaagtggatgcatgctgttgtctcaaatctcaattagaccttgctttgaggtcccttcattgccagtcatctgttctccttcccctgacttgagtatttctccagatatagataatacattttcccaactctgtgttccaagaactgacagtggctttcattcattttgtttgtttgtttgtttcttctcgttctcaagtatcccgcagtctactgtttcttccctccattcgtttgtcctttcagagtttcaaaatccagcataggtacttcttctaaaatgtcttacccttcacatacacacaccacttgagaccccatcagcctctgtccacacagtttggttacattcatagactatttttatacatcaaaatatttgaaaattttagggtaaatctcagtagtcattcatttttgctcttattcaaccaatactagtcaatcagcctgtgccaggttttgttgcaggtaccaggtatccatccataaagaaaacaacgtccctttgttgtggaatttacattttagcaggggaggcaaagaacccaataaatatgataaaatatcagattaaaagtacgatgaaaaaaatcatcagggtaaaggaaaaagggaagcagtattttagcaagagtggtgaagagaggaggctgagagtgtgacatctgagcagagacctaaatcaagtcaaggaatgaaacatgctactatctaaagaaatgagtcaggataaggaactagtaagagccgaggcccagagatgtgaatatgctgttccaggaacagcaaagagactggttgatatgatgtgaaaaatgagaagaaaccttatgatatgtgtcaagagaaaaaaaaaatttaaaagcatgcttgggaacggaggcctccagatgaaaaaaaaaaacacagttcaaatccttgttcatgcatttagtttgctttgcaatcttgggcaaaatgttaaatttctgtacgttttatcttcctcatttttaaaataggcacaaggacatctacttaataggttcattgtgaggagtaaatgagatgatatatctaggatgcctggcattatatcatacacttaataatacactgaataaataatagttatgtctatttatttccttatcgtttttattattatttcaatgcacagacctgttcataagataatgataaatattagtggcagaaactgaagatgttataaattattaggaggcgggaccactcagttcaatgtatctgttttaatatagtcagcaaaagtgtgaagataccaacaattaaatttcaatgcattcttccatttcactagttttataaactgatgaactaccagaatgtcaatgtatgaattgcatactcattcttaacaaacagatttgcaaaattatgtgtaaaattagccctcagccttccaatttgttattgtcatatttcatggaaatacataatctgtaaatttttgttttaatgatatgtgaaactgcctaaagtagagtcttggcaactacttcacatttgtcctccagagatagtggataaaagtgtcaataaatgaacactctatattcactaatcacaggcaagggacaaggaacagagtggtcacaaaataccacaaaattaaagcacattccaaattaaatatatatgtttttattacagataatgtttgctagactctttctaattatctgcaaagattttaggaatgttttaatgttttaatatttacacacctgtgtatttcaagttcagtcaaacactattgttaaaactaaatcttctcatctctaataataagatgtgaacttatcttggaaggtggttattaggatgggagagataatgtatttcattcaaagtaaaaatatttctctgtttctatctttctctttctctgtcatctatttatcatctatatccaggtatctatgcacctatgtagactagcattcaatgaaccatagatattattagtagtagaattgttactaatattaaaataagaagtatttaagaagaaacatgtcctaaagcataaggtcaattattactctcatgttttttggcatatgaagcctaaaaagtgtcaatttcaagagagtattaataaagattgtgataactgaaaggttcctgcttgaaattttgtgtggtcttacaaatatataaactctaagcatttcagtgagccaattactgactaggcactatgtcttatgactcttttgtcatagtatgtaaaaaacaaagagtagagacatcataaaaattatagtagatgggcactagggaattacgcaaaataatttgtagatttaatgtgaaaccaaaacatctgttcaagtcaatttcccacaggtcatgtggcaaagagtatgagttccagactgaggagaggaaaaggttgttcttccacagggaaataaactgagtgtaataaacataatttttcttcttaagcattatttaaaacaaaaaaaatgccattaaatctatctttcctgcctctcttatcaatgctcccttccctttcaccacttgtttcaaactccaagccttgggattttattttggctttttgccttaatgtaactaaaatgagagcatcacaaatatgaagctcatcaaataatttagcagcattttcccctgtttttaactttctctttggaaacgtagatttcgaaatttaagggcccaaaatatgaaatgcaattataataggccatttgttcattcagcttgataaacttgaataaatagtattgaacttttaatgcaaaaagaacaaaacaaaatagaactctccacgaagaaacttttcaatgtttgcatttctgtgtgaggagaagggtaatgaatgtgggaaccttaatggaatccatgttcttccagtgatgacaagggtcaaaatggagaaaaatggtcactttctacccagtacattatattagttctatgtggacaactataacatagctgatgctggttttcaggccataaatgtaggtatgtattttcctactatttataaggcaaaatttctatttgtttaatgatttctatataggtagattattctgtctttaggattaaaaacgacctgtagaccaagagactttctaatgtccaccttagagtatatggcttttactgttacagtttccatttcctttgcttgcccctttgagagaaggaaaggagacatttgggatacatacatcaatgaggagctattaatgaataaatgaatgaaattgtcagtcaatttatccacatgatcatcaattgccaataattttatcacctctgtgggattaagtagaggtaacagtttagaaatttgattttttgaaagcatttaaaatgttcaaatatatcactctggtaactaagggaaagtgtattattttcttatgcttagtcttattttggttttgcctttttaatttaaattgaacacttatatcaaagagcttgcaggattataatttgaatttttgaagcaaagatcattttcttaacatcaaacaaagagtagatacaataggaataaaatcggcagaaaaacaagagtatcaaggacagacggggagggtgggtctgtgttagcatgtattgctatgaagaaatagccgagactgggtaatgtatttttaaaaagagctttaatcgattcatgattctgcaggttgtacaggaagcaggacaccagcatctactcagcttctggggaggcctccgggagcttttactcatagtggaagatgaaacaggagtaagcatgtcacatggccagagcagaagccagggggaggttgccacacatttaaaaaaaaaaaaaacaaaacagatcgctcaagaactcagctgctatcatgaggacagcatcaagctgtgagggatccacctccgtgactcaaacatctcacaccaggccccaagtccaacacttggcattatatttcaacaagaaaaaaagtttaattggctgatggttctgcaggctgtacaggaagtgtggcacaggcatttgcttggctcctggggaggcctcagggagtttttgctcatggcagaaggtgatgcccacacactttaaaaaaaaaccagatctcatgaaaactcactcactacactgaggacaatacaaaaccatgagggatctgtccccatgacccaaaaacctcccgccaggccccaccaccaacattgggaattatatttccacttgagatttgagtggcggcaaatatccaaactatatcagggctcatgtccagttatatgtcaacatgcctgcattcgaaacatcctgtccaaatcactgccttgtcataatacttatatttttctttattgaatacgaacacaagaagattaaataatagcatttctactttaaaacagtgggcaccatattaacattggaataatagtagtaataacgatagtaataacaatgatataggctgggtgcggaggctcacgcctgtaatcccagcactttgggaggccaaggcgggcggatcatgatgtcaggagatcgagaccatcctggctaacacagtgaaaccccgtctctactaaaaatacaaaaaaattagctgggcatggtggcaggcacctgtagtctcagctacttgggaggctgaggcaggagaatggcgtgaacctgggatgcagagcttgcagtgagccgagatcgtgccactgcactccaacctgggcgacagagcgagacttcatctcaaaaaaaaaattaaataaataaataaataaataataacgataaaaggatatgtgtaggttttttttttaataggctgttaacattaataggcattgtgatttcagggatatcatcaaacatcctggtcctaagacatcccctattgaataggaagggcttaagttaaacttctcatgagccacaattttctgattatatgtttggtgtgtgtaatagccacctcagtgatgatttgattagcctggacccttacataatcattgaagtatacccatgttcctttatatacttctttagtgttgaaagctcaaaattaagcaaaatagtccccttgataatgtttagattcttaacatttgctttctaaagctggcaaatactctcttcccagtgtcatgaagttaaataacatgttgcttagtgaggactttaatgttgccatgccataggaagaccttattcgaaatccccttacctgggagaatgtcagattattaccccccaacttgtttaacacttttaggattttaaaggtgttcacatttgtattagaacaaaatactattgagaaacatttctagaaaaaaattatctttccaaattaaaatcagtggtatgtaatgtaggagtctgattataatgattaaaatacatgggctttgggcatactgcctaggtgaaactcctggtttattgcatcactattagtataacctatgggagttaacctacgtaagcctcagttaatttttctctcaaattgatctaataatcgtctctcataggcttgttttgatagatatttcagtgtatataatatacttaggacagtgcctgatatcagtaagtctccttatatgctatttttctttctattttaattatttatgcaagagaaactattatgctttaactcaattaaaataaaatgcctttgtatttattcatgtcaaaggaaatatgcaagtattgcattcacttcctaggtgcctttttgaattgagctttgcatggttagtttgtataaaaggttcagtgaactttctcataatgattttttattgaacatatggaatccattaagtgttagcaaaagtcactatccactgagctgtgtccaggggctgacagttatgtctatctcttgcaaaaataaacacatacataaatgcactaagacgtatattacctgtcgtcatctcttagagcatttccatttttcttttaagttttttctttcaatgggttttttatctttgtgagtacatggtaggtgtatatgtcaacggggtacatgaggaaggtgtatatattgatggggtacaagagaggttttaacacaagcattcaatatgaaatagtcacatcatggagaatgggttatctatcccttcaagcatttgtgctttgtattacaaacattctaattatactctgttagttattttaaaatgtaccattaagttattactgactatagcaaccctattgtgctatgaaacagtagatcttattcttatttttctaacatcttagaacatttccacaaacactacctgcttgttaaatatacctattctaatcttcatataatcaattacttttttcctctagaatgtactatgacacatccatggggaaaatgtagtaatctaattaagactatttcctctcattttatatttaaaagaatgtgctctatcaatttatttacttgtacagccgtaggcaacctctaaaatatttaaagttcttaaaagtcagatatttcagttaatattgtgattatatagttgattttgatgaacatgttcatctaccagaaataaattatacacacacattgatatggttaggctttctgtccccactcaaatctcattttgaattataatccccgtgtgtcaagggagagaccaggtggaggcaattggatcttgagggtggttttgcccatgctgttctcctgatagtgaatcatgagatcagatggttttataaagggctcttcccccttccctcctcactcattctccttcttgccaccttgtaaaggaggtgccttgctttctactatgccctttctactatgcccttcaccttctactatgattgtaagtttcctgaggtctccccagccatgctgaactatgagtcaattaaatccctttcctttataaattacccagtctcaggcagttctttattgcacatatatgtgtgtgtatgtgtatgtgtgtgtgtgtgtatatgtatgtatatatgtatacatatgtgtgtatatgtatgtatatatgtatgtatatatgtatacatatgtgtgtatatgtatgtatatatgtatacatatgtgtgtgtgtatatatgtgtacatatatatatatatatatatatatatatatatatatatatgaacagagagagagagagagagggaggaagggagagagggagggaagcatggagaaagagagagtaatagcctaaatagaaataaaactagctccaagtacaggttcgtcaacactctcctatcatacccccaccaaagttaatgttaaccacttggagccctgttcttccttagttgtggagtactttagcaaaattttaaatctaattatgcctaattcaacgacagtgctaatttgaaagtgttagaaactgaagacctataataataatgagagttacaaaacataaatagtgagacaatgatgaatgtagtggatgcatgtacgagggctatcatttgacagtagagatgatgctcaaggacagacaatgagtctttcaatgtgtggagaatgtgctgctgttacagtgatgtacaggaaagaaacaaaaactgaggaagtatcagtaaacaaaacactcaaacatatgagtatacagctagaataaaagcaacagtactagatgacaataagcccaatgttaactcagaaagcagaaggtttttaagaatttggggaatactgtggctgatgatacttatgtctcaagccacagatgccatatgggctctgcgcccagttgaatcggcaccacctggcagtaagtgggcaggtccacgactgccaggacatcccttccaacacttgtggagatcaccaggaaggggggagagacctgccttgacagattttcaatgtgggcgaaacaggtctattttgagaaaagatgttcaatagaacatatgtcagcaaggaagaagagatgatgcttagttctaaagctccaaagagctggcttacactccaacttggggaaaatgcatccgggaaatgcaagattaatctcatcttagccattcttttgaatggatggacatgacccctttctacttgaagacagaaaacataaccatattgatttcaggttttcttcattggtttccatttaggattgttcctccccatcttctttctgtgtaggcatcccagttcccaagtgttcatgaagcacgtatggccttcaggggatgtgtctgtatacattgttatcttatggatgcacggttttgtctgcaccttggttctgaatgtctttactcttgagcatctgcccatgggtccccttctcaaggcctcaatttcttgagtttaacactgcatggcccatgcagcttttcagttaagcatctcttgctatgaccaactcttttcctcagtcaactcccacactcttttcagggacaggaaaaatgtagccacttgctggctgcactctgaggcctcaagaaatttagtgaatctgcctttgcccttcttgctgatgaaatactgccacatcaggccccctcttcggaaacctacaagcatctaattttcttgcttcctccccaactttctttttgactcccccccatccagagagttcttatgtctactgtactaggaaaaactcattcttaaggtatggttttcaaatcattctctggtctggactttagctacggttttaaatgaagaaacaacccagagccaaaatataatgaaactatttccttcttccacagagtggaaactgctttggggttaaagggccagtgaaccaaatagaaaaggatctcagggaacacagattgaagagagagaagaaaaaatatgaaggcattgttggttctcttttgagtttaaaatctagtggggattgtaagcacacacacatatacacacacacgcttacacacacacaccagtgaagttatgaaggattttgtcactccaacgaccttgaatttgattatctaggtcagttgttaccaaagtggaatgtacatgcccaataatatgcgtgctaaacagttggggtagtgagaaaaaatactttttatttatcttgttctctagaaattaatattttgattgtatattttatagtgtatgtgatgtgtaagttgtgtctacaaaactagtgtcaatgtaatttaaaattacatatgtctgtgaatatatatttatatagggtacatgcttaaaatgtgtttacttctgaggtacatgaacatttttcccccaggcacagaaagacaaataccacatgatgtcacttaaatgtgcaatgtaagaaaagttgaattcatagagatgtagagtagaatcatggttaacagaggcttgggaggtggagtgagggaatagagagttactgttcaaagattacaaagtttcaactagacagagggaatacattttgagatctatttcaggaacattttgagaccctcactctaagtaataggaaatcattactttagttaacatatttgaatatgagttgtgatgttctatatcgtttatttggattctactaacccacacctagatttttatggcattacctttttactcactgtgaatatcctactcatagacagatgccctgggaacttggacttgaggcacccaagaactgagacagtgagatttgggggcacaaggatctatggataagttcatcttagtgatgataaaatcaatttggcatgtttcacggacagtgtgcattttagaaagggtaaagacttggaaacgggatatttttgagcccaagtgtttccaataaatagctgtataatttgaagcaaataattgattttttgttctctttgtgccctcgcctgtaaaatgggagaaatgtattcctttctcatccttctcatgaggccattgagagtatctaatgagatcagactgtgacatagcataataattctcatttcttgaaggcctattatacactttgcaagcactgtatgtgttgtttctacttctcttgttcgtttttcctggaataaatatccccccctcctttacattggattgccattattcaccctgtaaggaaggcttcatggttctcattttcatctgagaaaacttaggctcagagaagatcagtaacttatctaaaacacacacatacacacacagacatatctatgcccattattcttaacctagtttctctattcaggagttatctctgctgtctctgcttctgattataatctgtgtaagctgatccaagtgacacgattacagggaaattgtaagccctttgagagcagagactacctattgatatctacattttaaaatttgattttagccaacctgtttatatgcaatgactaacaggttagtttgacttgcaataaatattccaaatcctagactaagtaaatttattaatgtaatgatttaacttgattttttcattggcatgtttccctgaagtcgtcatgcaaaattgaaaaaaaaaaaagtatagtgtgtgattctagattgaaattcaggaatcctccagggttaccttgtttgctttccaaatagttcagattgcttagtctgaccaacaaggtccctgacacttggaactctgtctatccctctaattgactttgtccctgatgacctcgcccagagatactcttcaccccagctatactgtgttgctagagtttctctgatatcccatgctattgtttcctttgttctcttcataaggtaccatttcccacccgccaactcctgttttcctgatggacttttgtttcaccttacaagatcattgctaatgtatttattttgagaataaaaagtgtaggaaaggtcacgggacaaagctgtacaccagacctttcccagacgaacctagtgtataatctccctagtccaacatcatggcttaaggcagtcgatagatccgtcttaatgtcccttttgagttttctactattattatatgaggatttatttttgtctgaattcctccctagatttgccctagagagcaatgactatttacagtttattcctctttgtatctcttatgttaaggccagaccttggcacatattctagctgattagaagacgtttgttgaatgaccaagtgattgaacaaatgaccatgtgctctgccacagtccggtcagttctactttggtttggttatgtgtttgccacattaaagttgtagcctgggaagttcagttgtgagatgtctgcagaacatgaaaaattggaataatgaggttatttctaaaattgctataatttaaaataaatagtggtttattccatatatgaatatacactggaaacaaagaatttctagaatactggagattcaatgataacatcattgaaattaaataaataataggattatgctagttactttctaatttactagaaattgaccgtgtgcatggcacgtataatgagtatcatgggatagttacaaaaagtggtgcttagtgagtttctgtggaaaatctcggtaccaataaaacggaggatttccagaaatcgatattcctcaaagcttgacagtatttatgcacggttacactttgtgtgtctttcgtttgaatcaatggaaggaggctataactgaaaattattgttttagtgtattatatctttaataataagagttttaagaatctatcattagaaataattattcctcaatttgtaattctcaacatttgaacaaataaatgctctgtgtctatcagttaatcttgcccatgaagatttaataaagcacgctagtttttacaaatgtgattttagagatggtcattacttggtaaaatattttgtgttaacacttccatgaatatgttctgtgggaatatactgcctccacattgcttgctcatgaagacatgatttttcacatcatcctatcagtattttgagaaagagattgatcccatattctatgagcatttgaacattctctagtatttttgtttaatcattaaaacaacccttgaagtctatgtgctacactggttatttccctcttgactttcctttacagataaccctctatcataaacaacctatctatatttgttgtctccacatcatgttgccagccctgctttaacacactgcacattgacttctagcagcaaaggctcatgggaggtactctcatcaaggacactgatggtcctcatgttgctaaatttggtgggtcctctacagtctttatcctagttcaccttattatggaccactgtcaactctgttctgcttaaaacactctgttccttgcttatatgactctacactcttaactcctttgtgaattcctcatctgcccttccattaagtattgacgacatccttcatagttttgatctaggacctcttttcctcttacttgacattatgtgggtaatcttgtctttgaacgcaattaccattcttatgttgatgacccttaagctataattccagcccaaatcatttttctgaggaagctacaagaatacacaaatgtctaatagatctctatttagatgtccctcaggtgcttcaagcttaaaatactcacctgagctcatcacctcatctataaattctgcttctcctccctggctccctgatttatttaatatgaccaccatccacttagttgaataaagcagaagcctggacaccatctatacctccaattaatcactaagttttgttgttaaatacgttcttacattttctctctagaatgtcttattttccccatctttacacccaaaaccaaaagtcagatgaccctgatctcctgcttagatttcaaaacactatctcttgcctagactctggaatttcagtcttgctcctctccaatctatttctacaccctagactctggaatttcagtcttgctcctctccaatctatttctacacaaaagctagagtaattttttaaaaaacaaaaatctgaatgtgttcattttctgcctaaaagccttcagtaattcttatttgttcttccagggatagagtaacaactttcagacctagtttattagctagttctttaaccacaaaggactctctcacttgtctactccccctaacacacttcgccctaacctttgccattcctccctttcccttttccttcccagatggacttaagtcctttcagattcttaaatgtttcttcctccagtctcttacatctcttttccttgtaactctaaaaactacttagcttacgcaaggaaaaaggtctgtacaattcccggaatcagcgatcctaacgttccctgttgtttttttcgttgggacatgaattcattcacagtggctctaaacatcaccacccctgcctatctctcccattcctactttatctgagcttatccatactcttgaagacttacatattttttttctaccaggaaatcattactagccttattatcccactgtccaaaccaataagtctgattaggtatctgtatatatttaatattactatatgtgtttttctaacactctagtagaggagaaggtgtatttctttctgttttttagaagcctgtatttctgctattatagctcttaaggaactctcatgcaattgcctactagaatgtaagttacggtaggataagaactggatcagtcatatcacacatccacatataggacctagcaccatatctaacacacagcaggtactcaatacatttctttcccaaataactaaagagtttaaacaaaccaaaatgattaaatgagaagtaactgttttggtaattcttgtgtccttactagagtctaaattgagtgatttttatatcatcagtttatactcccctttcccaaccccaattctttcttttttaaattttttaaatcaaatatgccttaaaacttcaggatcagttgagtaaaatgatgcttttgtcgtcttttgcaaaataattgtatttcagaattttgatttagatattataaacacacctaaaataatagctttagtcttaagatgaagtgcttcttaaactccctaagatgggttggactatggatatgaacatggacaatatcacattaatttgtgtacacagttctaacacagggtctggcatataagaacaagtcagtaaatagttgttgaatggaattgaaaatttaagtagcaaataaagtattttgacctacaaagcaagaaatcacatttttctttttgtcacagttccttaggaagataattaattttttagtatttaaggatgttaaatatttattttatgttctatttactaggcttctttttatgaaaattaattggtgaaaatagcgtacatatcttcctttaccagaacatttacattttgggcagtaacgctggcttttgttaaaaaagcaaaatatgtgtgaaatttatgtttgagttgatttcaatgcattacatttccattttaaatcttctttgaaatactctatttttgacaccatgaaactgtattagatcttagtatgttagcaatgttttgcagttttagagccataattattttaatgaccactttcagcatatacgttttctacaggaaaaataatctcaagaacatgaaaagtgaaatctatattttgggtttcaaaatgatacattttagctaaaatatcatagttttaatttctcagtgaaaaatatagtgtggtaatttatgaagagactcagtgtttaaaaattatgactctatagtcaagtttatgtttataggacataggttattcaattacatttaaaataattaatttagaaaatgtgatcaatgtaacaaattttacctgttcttttctaaagctaaatttgttgtttgaagtgtttcttctaaaatgctaatgaactatcaatttaattgttgagcttagagttagaaacttaattatattgccagaaataaagaaacaaatggatcccaaaagattcacacattagaaatgtatgccagggaaatgcttttgaatgtgttcaagtcatggcttctaactcgtaacttataacttgtgttatgtctggcttcattcccttaagaaaaaggaataataatgccttcggagagcatcccagctgtaagagctatgcattggtgtctaaaaaagcttctcactcctcataccatcctggtctgggaatttaaaaaattgtcatcttttgataatctgtatcacatagtcttctgcatagtcatatgaggttagaactgccccataacttttgcagggcctatagtaagtgtgcaaatggttgcctgcatgccacatatttaatatttataaggtataaagtcaacagactattaaatatatcctatctgctttccttgacaattatacaatcataatgatatggacatctagattcgatttagaattctctctctctcattttctttttcttctttctttctttctctttctttctttccttcctttctttctttctttcttctttctttctttctttctttctttctttctttctttctttctttctttctgtctgtctgtctgtcttgtttttttaaatagtgcaagcagtttattccctggcaaggaatttggaaaaaactcaaatagcaaaccacttgatacaataaaataaattccttagagttttgtactggaatgaggcagcttggttagagctaaccctaagcctgttatttaggatacattggcttttcttaagcttaaaaaaaattttactgtgttaatgacatttaacatgagatctatcatcttaataaatactacatgcacaatacattattattgactctaggtagaatgttggacagcagatctctagagctaattcatcctacttaactgaaatgtaatgtctgttgattagtaacttcctatttcgccctatccccagcccctggcaaccaccagtccagtctttgattttatgagtttgactgttttagataccttatttcaagtaagtggaatcatgcagtatttgtctgtgtctgtcttgtttcacttagcgtaatcttaaggtccatccatattgtttcatattgcagaatttccttttataaaggctgaatagtattccattgtgtatatataccacatttatctattcatctgccaatgggcatttaggttgtttctgcatcttagctattgtgaatctgttgccttttttccctacctcctttactccatcctgcactgtgaggaactctgtgcacatagatctggtcgccccatttcccacccacatgttcaagtttttcccactcacctcatgcaaagatttaccccttagccatacccagtaactgactttgaaacatttgcccagggagttgagggattctgaatgccagatcatgggagcggggcttctagtgagcatgttggcttggtcctacagactcctaatcagagctttgcctttgaaagcatggggcccaagggcaaggaccctacttgttaaggtctaaattttttttctgaaataaccacatcgagcttttatgtgtagatggcctaaattgggctaacccagaggcagtgacactcaagtagtttacatctaagcgctttccatgtgcttcttttcccatttctgttacttcttacaaaataaaaaatcagcatctcaattaccctgatttgatcattgagcaatctaaaaagtatcaaaatatcacatgtagcccccatatacatacaactgttatatatcactataaataaatatatacacattatatttaaaaatcaatactttaattttacatgtttaacaaatcactagcatatacattccagattgaacttacgagggatgtggaaaagattcagtgactaaataacaataaagtactctaaaaatgaaaatgtgaaatggagacagtataaatctaaaatcatatcacttatgaagtattgtttcaaataaacaataaaatatatcttcaatcaatttaattttattttagttgtataaaatctttcggtcagcattaacctaattggaacactaaataggtacatctaaaaaatataatcccccccaaaaatatgtagctcataagagataatgcattgaacacagataatattggcgttaaaaacagaactctaccacatttgcaacgaaatgtttatctgttcttcctactagaaaataataaaatagttctgcatgagcttgaactcgaagtattaggtgtacaaagaccttttagtgaatgaatgctagctgaaaagcaaattttaaatatgaaaaattagcaagacaaacatttgaatttgtgggagatgagtaaaactcctataaaaatgaattgtttagtgttaaacagattgtgtatgaaatattaatggcatattgtcctgagctccccttccgctgtttccatgtagatgactgaatttcaaacagaaatatgccaggaatgattacgtgaatgaatattactacatgagattgcttaaagagtatttcttcttttgccttctttttactttcgttatttcatttagtagttagaaaatactgtctacaaatatgtgagaactgcttaatttatttttgagacattaattaattcaactaaactatattgactgtgtgagagagattcccttggtgaatatgtggatttttgcggtggtaagaactctcctctggagcgcaaatggtattgctctaggaataaagcatatacctcaggcccagatgaaccagtgcaatctacagtaacaggttcaaagatgacctcatgacctactgtggactaataaaaatcaaggagacctactgcaaaggtttctgggaaattctttttctcttgcgttgaactaagtaatatacatatgtgatagttagagctgcagcctttgtaataccatgacagaagataacctgaaataaggctgacagacacaagagggagacctaagagtactgagagatatggagcaggaccccctgattgaacttcacttgcagcccccttctgcagttttcaatgacgtgaaccagtagaatccctttgtttactgtttttgattaatttgagtgcagctttatgttatgagcaactaatagcatcctcactgtcacaactgccctctatacggcaggcactttgtgatactaaagaaagcagtatacagagtagagcccagtgaataacagggcagatgttgcaattaaactgcctgtttaaattctagctcttccactagctaacttgtgactatctaagtaatttaaccttcctataatcatacctatcttgaagacttgttgtaagatttaaagcacaacagtgctactataaaacaggtatacagtaaagcttagctacttttttattaggccatatgatatcatttcattaaaatcttatagccatgctataaggtattatgatcctcaatttataaataagacagctcaagttttggtcaagtgactttaccaaggtcatagagctagaaaataatgattccaagttacaagccaaacctcttcaatgccaaatttacatcatcccccattacttgaagtgtaagattcacatggacagaaatttttgactgtttgatcactgctatctccttatcatctaaaacagtctctggtccatattaggtgttcaataaatatttgtagagtacataatttccttcacagactccacaatctggtgaaggaggcagacatgtaagagaattatttcaggattccacagttgatgctgtaacagagctaaatataatgaatggaggaggaatgaataagtttgtctgggagcaatgctatggctattgaaataagtcttgctcatgctttgattgaaatggtggatatagatcacacaacaaataacaattagataacagcttgttgggagaaagcgaggatcagtgtttgccataaacatttctcatagctaatgtcaggtgtttgatttctcaacattttatatctttgactttgattttctctgtttttattttttaactccattctcaagaagtctgcacataagagtttcaacatctagcacttcataactccgtcatctcctctcaggcttagagcaaattctgagacgtggatttatcgtcgagtgatttcttcctggcattttatctctgagaccaggatctggttgctaagcatgtagacatagaaatgcatttcttcattgaaccccataggttcaaactagtggataatgagcacaatgtcaatgtgattatttgtaatgggggaaaggttaccggagaatattacacgaccatccacatagactaacattttcctcatgactaagtttacttagcaaaacaaattaaaaacagaagtttgtttagcagcacagaattgaaggaagacaaccagatggttatgaggaagattcatccaaactatgccagaactgaaagaaattaagttcattcagtacaagaattgtctagaataagagaatccattttgtgtcagcacttcccaagttcttgttaatgctaccttaagttcaattcaaaccaggcagcatttattacgtgttgtgctgggtcctaggaggaccgcgttttaagaacttactgtgatcttctagatcaagtttttatttcaatatttctacctcatttctgattcttaggtgttccttatttcccaatttatcccctgcagaaattgaggcaataagatgtctatcttattgcctatggtgttgattatttatgttatattctgttttgtgaagtttgacctctacctaattaaattacattttcaattgtatcttggattgatttattcaataagtattctttaatatttttgcatgaggtcggtcaggtttcatcagacattaggaattaattataaaaatctctagattggtacttggagcttaaaggaataaggtggtggaacgttaaatgaggaggaaagaaccagcagagctgggataaaattcatctctatcatcttcccacctgcttgatctctggcatataatttactatccgtgaacctcaggtttctcttcagaaaagctgcagggttgttgggggaaataaggcaattcctgggcttcagtatgttcaaaacagagcattaatattattatagacttttgatgatttacacaattttagctttttggcaagacatatttactagtactaagtaaaagcacgttgactttctaaaatgaaaatgtgtatgtgaggatgaagaaaaagaaagtgttttgtttgataatatagcattataacactgcacaaaaaaaaaatggtatatgcagagacttccatcacttgcttatgatgccgcattgggatctcattaataagacacttcctcagacacttcctttgtgttcaataaatttcaatttcctcctttccttcagttcacttcaagaaggacggcagcaactttcttgttgccaaacctgacaaatgttttttagtgctgattatactcgagcattctgtagcaaaatgctgtgggtgaaaatgccttccttcttaagggaatttagcttctgtagtaccagaatctccttgttgaatgaacatgtactgcctaagtcttagtaatccctcctttttgagcccattttctggcatctctccctttaatattcctcaaaaagttggatttttcctggacttttcatattacagactttcctttggtcatcctcatccattccgtgattccaactacattttccctccatcctggcatcttctttcttccagacttgtatatgcaactgcttccattcatacacttgaccaaccttttaatttctataagatcaaaaactcagctcacaagctttcccctaccatcgagcggggttcttcttttgcttctttgtttcagacaatggcaccaccatactcgagtaaggcacgttcatttatcaggtcctaccaaatctacaataaactctcttgaatttatccacttgttttcatttgaacagtcatttctttacctgggtagcctgcaccttctacctgcattgattcagcagtctcttcaccactggctctccctccctctcctgcctctcttcttgctccttcaatttattctctactcttcatagtgacttttattaatgcaaatatgaccttataactcccttgcttaaagacccactcatgtttgtctttgtatccataacttccggcctagggcttaacgcatagcaggtgctcagtaaatctgtggtagatgaaagaacaagttgtataaatactgaatggtctgatgtgctctttgttgtgtcaagaaggacattttgcagtcaggatagctacatcagtcctttagtaggcatttgacagcactcgcattattcctcaagagaagatggatgtattgattctgtatttcaaatgacataacttttgtgaaataagaggctgccacggtaatctgagggatctctcaagttcaagggactccacagtgctttgtgtaaggtaacaggctaaagggttcagtcttaaactttcttaagactgtagttcagggttcctatggtggggctataaccctgaattacatcctctttcatttcatgctgataatgagaactacaaaccaaggggtattaggaaagaatccaggtttgatgcagggaaaaataaaaacaactgataatctctagtgtccccaacttcaagaattcctttcttctttacaccaagctttttttctctgccaggacttactttgtcttctacatgtttaagggagaaaaatgagttaacagaaggggaggtacagcatttctatttacttagatgctagagaacaggatgaaaggtatgaaaaatatgaaagtctctctctctctctctccccagccttcccccgcttctctctctctctctctctctctgtgtgtgtgtgtgtgtgtgcacgtgcgtgtgtgtgtgtgtcataatactcaacctttcttttctttcaagcatatgttgtggcagagacaagtgtacatcaaaattcgtggtccctctttcatagtatagagttcttgctaggatccagctgcaagccagcaactacatttcccagccccactggcatctagttagagccatgtgactagttgtgaccaattgaatgtgagtgggagttatgttgcaggcataccttttccatcttcttacttcccatttgctaaccttatggaaaagagtcccaaagacctaggagatgaaaaagcctaaaatggaaggactcagagtccctgaattactgggtagagaaaagctgtttgcagatgggaatgcccattttgtagtattctttcttttcttaagccactaaaattgtgggatctctttgttatagctactggcattaacctcttacgtatacatacagctatgtgctacaaagaggaatagatacattttttaatcgttgaaaggggagaaagaaacatatttaggaggaaaataatttagtctctacaattgaaaagtgttttatgaataatattttgttttggcagcatattaaatctcaggcagctgaactacattaattttcaattctctatatatgtttttgtcttcagggtttagtaacactgatatataacagtttctttcttttaatttccaaatttaaatgtctaagtttgccttctaggcagaaattaagtcccattgtggaatgagattggatcaacacttcaccaagatcattttagttctttgtaatcttaaatgaaataagctaataaagcattaaattagcatgttgtaaaacttcgtgaagttttaatatgcttctaagtggcagctcttagcttattatctctaaagctaaagtcaaaataaatgtctcagttgatgaaatggagatgaggcaacattttatcaaatttaacaaaatattttatatctgaattataaagtccagattatctagtaattatcatataaatgtatttaaccagacatgcatttttctctaatcagtagccctggagtctttggaccacaaatgtgccttatctcaaatgctttaactgtgacattttgctttagactagctcgactacttctacagaaattatacacttcattcacattcatccagatgaaaaaaatacatgtagaaatgatcataataagtaacatttgtttaggatttcagagtttacgaagggtttttctattcactttctcacttgttcttcatgtaaactggtttggtggacaactgtcattatccctgttacctggagcccctgggtcttagggagacttcttgacttctcaaggtcatgaaggtgctaactctgaccgtgtttttattcctactgtgccacacttctcaggtaaaaatcatattgcagacactttaagagaagtacttaagaaaataaattcctccagagaattacatttaagttgtttcattaactgcagtgcataaagaaaggaaaagtgttcccaaacccatgtagtattttgctattgcttatggtaatattctgcacacctaatattgtcagcataattttccatgtaacaaaatgtcctaaatcagcaatgtccaatataactttgtgtgatgataaaaatgttctgtctctgtgctgtccaatacaacagccactagatacacatgactactgagcaatggtaatatggccagggacactaaggaactaaatttttatttaatattaaataacgtttaaatttcaaaagccgcatgcggctagtggttgtcatcagatactgcagttatagaaaattagaatttacctctttaaatactaaacctatttttaatagtaggatttttaaattaaaatagttctaagtgcttttaagtgatacgaagtcaaatgcaagatttctgttttaatagtactctcaacccagagacaatcttcatgcatccttatacatgttctttgttgccttattctagttttattttaacattaaatgcctctgttctacttgatattgacttgcttcagagaacaccaagtatagtggaaagaaacacacacatgaggacttgaggctaccaaccaggttcaactaaatgcactctgatttaattgtagtattgggatcccctgttgcatttattgaagaagaaaaaaactttgcaaccaaaaagatatttgaaagcaactgttcttcttggacacatgatccctcataaagtggggcttcctgcttttcagagacttaatttctgttcatattcatttcagcaatagtaataatgatgatggcgatgatgataataatcatgatgatgcctaagtgttgtagtaatgcttcttctgagccagacgttagtcaaattactttctctacattaattcaggcaatcatcacaacaatcccacaggacaggttttattattatacttatttagctagcaaatgatataactaggttaagttacttgcccaaggtcatactgccaagacagtggctctagtgtccctgcttctgaccatatgttatgctgcctatcctagagcttttctcttctaaaatagtaaaataatatattctttgtttgtttcatacttttttttttttttttttttttgagagggagtttcgctctttcgcccaggctggagtgaggtggcgcaatctcagctgactgtaacctctgcccccaccaggttcgagtgattcccctgcctcagcctccgaagtacctgggataataggtgcccaccaccatgcctggctaatttttgtgttttcagtagagacagggcttcaccatgttgaccaggctggtctcgagttcctcagctctggcagtccgcccgccttggcctcccacagtgctgggattacatgcatgagccactacacccggcccatacataaatattttaagcgaagtacacatgcatgatcatcatacttttaataatttcatttaactgtttccaaagaatgttagtatgaggttttctttttttctttttataatttcaacttttattttagattcagcgggtacatgttccctggatatagtgcatgatgatgaggtttgctatatgaatgatcccaccacccaggtagcgagcatggtaaccactagttcttcaacccttgcctgttcccttcctccctccttcctctgtagtccccagtgtctattgttcctgtctttatgtccatgtgcactcaatgtttagctcccacttttaagcgagaacatgcagtactcgttgtctgttcctgcgttaacgtgcttaggatagtggcctccaattgcatccatgttgttgcacaggccatgattttgttagtttttatggctgtgtagtattccatggtgtatacgcgccacattctttatcctgtccaccattaatgggcacctaggttgattgcatgtctttgccattgtgaatagtgctgtgatgttatatgtactttttggtatattcaaagagaaatgctattttcctcttgacatatttatgtcaatttaacatatttatgtcccttttctttttaggagcaccattctcttcctttaacattataaataaaatattttttgcttttctgtttttgtaagtgcagttttattgacagagtgagacatacacgtcgatattgtgactagctgcatgtcttctattatttagaggtctcactcaaatgtagattatcaaattctgttagtgaagagggtagaacagcagaactaatgctggtttccttctctagcattatttgatgataaactaagatgataataccccccaggtcttagatacctgcagtaggacaggcaccctacatttaatgctcctaggaatccttcaaagtgatagcatagttattatacagtaattgagaaaactgatgttcataagttagaaatttttccgaagttgcaaagaaagtgaatggaagaattataccaagttctggccgggcgcagtagctcatgcctgtaatctcagcgcttcaggaggccgaggcgggcggatcatgaggtcaagagattgagaccatcctggccaacatggtgagaccccgtctttactaaaaatagtaaaattagctgggcgtggtggcacgcacctgtaatctcagctactcgggaggctgaggtaggagaatcacttgaacccgggaggcggagtttgcagtgagccgagatcgtgccattgcactccagcctgggcgacaagagcaaaactccgtctcagaagaaaaaaaaaaaaaaaaaaagaggattataccgagttctctttgattccaagcccaaacaaatccttttttgcaatatatgacattgtttccctgtttgcattccccattctgtgtatcacacatcctgtggcctgatcaaaattcattttcagattctgaatttattttccattgaatctatataaactataaagacagaagatatatgtatgtgtgtatacccacgtttctcttccagtgtcaactgataaaaatagatttcaaagtctcaataacctttaattccctttttctcttaaaaattctttagaacttgtacatgacattctgactctagcagattttagaaaacagagaggccattagatattcataccttactattcagatgaagtattcaatgctaaattatgtaatttatctgctttgcaaattgtatggtcagattgagttccacaaaggagagataatttttaatataggcattctgtagcttccctaattattgaattagtttagagcaaaatccttaaattgtatcgttgctatgctcaaattttgtatacttgtccacgtaggctatattaagatttcattgaattttggtttctttctcagtgataattcaatatatcaactcaccactcagatttgcctttgggaaaatccaggccccttttctggatttttagagcagattttaaaaaagtgattctgtatatgtgttgaaattaaccacatctcattgcttttgaatgattgaggtaatgtatacctactactttaaaaaaaatgacttacttagaaggtgtccatagttttataagttccattgaactggtttatattgtatttagaaaggaaaactactccttttatccttaagggtgaaaacctggattttattatacaattaacacatatttattttttattatgaaatatatcacaatataaacgtttacagggagtgtttaaagtggtgttgtccaatggaaatataatgtgagtcaaatacgtagttttcaattttctactagccatattagaaaaagaaacagagaaattaatgtaataggatactttatttagcctagtatatccaaatcacaattatttaaatatgtaatcaatataaaaattactaattatgtatttaacctttttctttagtaagtctctgaaatctagtgtatattttacatttatggcacattgcaatttgcattagtcacatttgaattgttcaatagccacaggtggctaatggctaccgtgttggacagcacaggtttaaagaataatatgaacatctgtgttccaacattctgagtttcaaataagaagaacaccatcagtattttgggagaagctccctatgttaccccttgctaatcaccttccttccccccagagccaaaagtaaccattatcttgaatttctagtaaacaatgctcattttttaaaaaacgtatgttcaacacctgtatttgtatctttaaagagtagctagttttagtttgcctggatttgaactttatattaagggaaccaccccatctctaatcttctctgtgaattcttttctctcaatactatgttttacatatttacgttcatcaatgtgcaactcattgtatgtatataacacaatgtatatattttacatgcgtatggacatttgggttgtttttatgtttttgttcatcacaaaccacaacacacatgtgttcttgtatatgttttatagtgcatgtttaaaaatttctcaacagtattcgctagtagtattgtcaggtcatagggtatgcacacataaatagaaatgattgattagctgcaatttgtagtgcacacatatttgctatgtaagtgatccatgtttaagactttaactgaatttaaaaaatattttattggagccaatctaaatgagctaagggtttgtattgtttacataagcaaagattacacttactgggtcaattcggttgattaactttggatatataaaatatatagctagttgttaaatagatataattattaattggcattacttttgtttgtatataaaaatttcaaaatatccatgacttaagcaaggtaaacacccactgggtggcttaagcaacagaaatgtatttcttgcagttccggaagttgaacgtctaagattaaggtgatgacagggttggtttctggtgagtcctcccccattggcttgcagatagccgccttctccttcatgacctttcctctgtgtatgtgcatcccttgtagctgttcttccttttatgaggacattagacttattggattaaggtcctacccatatgaactcatttaaccttaattacccctttaaaggccctacctccacttgcaggggttaaaacttcaacatatgaatggggttgaggagacctacttcagtccataacagtttctatattctgaagatggtctttaattaactaaacagttaatgttactttactgggaatgtcttttggatgggggaataagctgatgatatgagaagggttggtgaatttctcataagtgtgaaatttgttgggccggcccagcatgattttcaatcaaatacgctttggggacaagtaggttgaatcactacgagaggtttaaaagaaagcaagttgtaattgcaacttttaattgaaagaaagacaggctttgttgatgtgccagcaagactgataactggctttaacgtagatagtaaggcagcagattcaatccactgatcgtgatctactagtgaatttcaaagccttatgcaatagaactacaaaccctttccttgcccaccttgcaggtggatccataggcaaaatgaacatttgcaaaaaagccgctatgtttcagaatttgtgctagggctttaatatctataatttctccaaatcctcacaatttaagaattaattcaacttagccccatgaatagggtgaaaattctgagatttaacaaactaaaataagttatctgaagacagacaaatagaaagagttgagatattctatttgaatgtaaaattttcaaaaagtagaatgacagcgtcaggaattacagtctcagtgttgaacacaagacttaggaacaaatttgctgcatgtaatttcattgagatgggacaaagtacagcatacgtaaggaagttttagaacaaataagataattattttacgagctttgaaacatgtgtaagaaagatacgaataaaagtataatcacatttgactaaaacatgaataccttaaaactgaaaagcactgagattatcattatataattttgaatattttaaaccacaatgctttgggagtgcactgtaatattttagaattggaattttaacttactggcttaaaaagtaatgtactttgttttaaattcaaagattatcttgtaaattcagttcgatctattgaaaaaattataaaattcggcaagaagccaaagaagaacaattatgtagctcaagataattaaattttcatgtttggctttagaaatatattcgtcgtgacatagtacatggtaatctagtgagcccagacaagtagttttctctttttgtcaaagggaacaatttgatgcgtgttcaagttgcttaaataaaattttgtatgtgctttctcatcacaagagaacaatatgatttttgaaattatttttactttataaaagaaaaaaaaaagccctcacagagaaaaaagaaaaaaatgatgatgtctttgaaaaacaaagttaatacagctttacatatatttgacctacatcagggttaatatttttcaaggtgaaacattagatgctggaacttgcaaaaacaggcaatcctcctttagatgaaacggacactctaagggttaattcattcactgagacctattgtgaagtaagccctacagagactgaaaaagttaaatgcaactcacaaaagttgctagaagagtcatgatgttaaaataaaataagtacacaatgtatgctgcaagtatacttagagccatgctaggtgcggttgagaagttcaatacaggtccaagataatagctgcttctcctatagaacatgtcttctcattggagggataagacctgtgtctatgaaacaggcgtaattacatagctctggaactatatatgccgaaataaatgagacagtaagtgttattgtactataaagaatgaagaaatcatgatgagaagtaacagttaatgaatgttttctagaaagagtaggatctgaattggccttaggttgtaagcagagtttatagatagagtagtggtatgtcagagtcactctgggtgcttaaacatacaaatccccaagtctcacccaaatgtgtcttcagatgaaaggaaaaaacaaatgacttgagctcccccgcaaagaacacgggtggtatattgagcagccaaggagtgaccagagtggcaggcccatgttgagggacaaaagaggacaattagaatatgattaatacaaatttacagtgggatgagttgttagcctgaggagcttgaatgtgaacctctgtgcaaaaaggagtcattaaatacttttgaaaaaggtgggatgggaagaaaatgacattctcaagacaattagatcgaacagtattaagcatgctgacttattaagttatgcaccttgagagggtggaatgagggaaaagggtctttatctggagtaagacaggaagaagctaagctgtaattcttactggactgtaaattatgtgcagatatattatctgtcatgttcgtgggcgcattctcagtacatagcacttgaaacaggtactcgataaattgtcaaatggatgcatggagtgatttccatgcaaaatctaatattgtatagtattagaagggggaaaaaagcatggcattatgctagcagaaatgtcatttggtattgaggatgaaacattttcaacagtttgcaaagccatccactcaaacattctgtcactttccaataattttgaaggatgttctttctacttctaccttattacacaatgagttgagtaagataaagaagtcatgtgcaacaaaacagagggagattttctgaaaggcactacaccaggaagttgttgtactcttgcttcatcttgccatcttggatatacttctggcgctacctccaggccagttcctcgttacatatgtcatttacttcccacatgctagactcaccgagttaatcattttgctgcagttaacacattttagcagagtgtaggtttatgggtgagaaggaaatcaatgatgtttcaatacagggttcttttcccatcccccttatttccacttagaactgtctctcaagtcttaatttgcctctaaacttttttcccagcttacattcttttctgaaaaatgcaacgacgatgccaatgtttgttgacctgaaatacattgtaaaacattcataatactttgagcagagcttccaaactcccatttgcctcttttatctcccttaccttggcccctttttgaaggcaatgtgatatttaatccgtttctattgatgcttcaaaattattgaaaaactggtaattgtatttttccctttacttatcagttgctagttgacaatgagtgtttgcccaaacaataaccaatcaaaaggtaaaaaggagattccagacatatctgagaagaaattctttggaagaagcccgtaaatggaatgggaattcaaacaaagccgtttccaaaagaaatactaaatggtctctaaatgcaaaaggattgctccccaagcattttatgggagcataaaaagctcccaacacattttatgacaatacttctactcaatgacttcttgtgttgacatatttgttgcactcgacgttagtatttacagcttcttatcccaaatatttacttaactgaagccctgatgtttttaaaaacttttcatctgtgtttaacagcccattttacagaaacttatttgtttcatcaggcagatatttactgagaacttgcaagtgccatatattctaaaaatgctgatgataaaactgtgaacacaatagattctcatggtgcttatggtcagggctagcacacacacttgtgaaatgatcactgatgatcaaaggcataaacactacatttggaagaaataccgagggatccagaagtatcttggaaacactagcaagtatagcagatggtgggattggtgcttcaaagaacttcttgtggaagatgttacgtatgtaccttctctgtgccaggcactgctaggaagtgctggagagaaaaagatgtgctagataccgcctctgtcctatgtgcttgtgctttgtggggaggtgagtaggataatcccagttctcatgcagtgtaatgagtaccatgacggaaatgcactccaagaactaggcagcatgaccagagataggacatttgagaaagacttcactcgggtggtactatcttagtctgggtgctaaaatagatgtgatagatgagtaagggtgacccggaagcaggagggaaagggaggggctttcagaacaacaagtgcgaggacattaaggtgaaatagagtataatagtattcccagatccttgggattgttctccattaggctaaaacaaaggtgttttctcttctttaagatttcatgactgcagattgcataacagaaggtcatttaatagacctctaaactgaaggaattcttgaattaaatcacaacatatcttccatggccagagaaaccattgcctccttatgtcgacattactaacagcaccagcacctgctgctcaggccagcgggagggttgggtgttgctgcctaggtaatgctcaccaactgatgtcctgccatgagtagttttgccaagttccacaaaaaaaacttagtgttctatcagcatctaatgagaattacagtcattagttaaataaaagaactattagataaggagcagaatgaacaacacacaatccatcagcttggtgaatggtatcagatggtttctgggtgctgggcagctgtgcatccaagtagacagggagaatatatatgtcctttgccttatgtacttgtttctctaatccaaaggcacagcaatccgtggaagctgctatgataaggtgtttagtggtgaaaatgtcttgaaagccagtagattattaaagtgatgtttttaaaaatgcagatggagagtaagtactttttatctagagtagtagttctcaaagggaggtcccgggatcagcagcgttagcatcacttgggaacttagacctgcatgggccccattccagatctcacttgaaaactctagggggtgtagcccggcagtctttgttgtgaccagctctccagggggttctgacactccaaatgttcaagtttcagaacgctactcacaggccatcatgctcggcatcacctgaaagcttgttagaactagaaagtcttggccccaccccaagcctactaaatcagagtttttgggagtagggccaagaaaactgtgggttaacaaggtctccaagtgattcttattcatgtcaaaatttgaaaagcgtcgatcgaactgttggttctcagctttgattgcgtatctgaatcacctggggagacagttgagctattccgggcccagatcacatctagaccaattgaatcagaatctatggaggcaggacccagacatcagtattttaaaatatttcttgaatgatcccagagtgtagctaaggttgagaaacactgttctaggattaaaggattaatgtgtttgagagtatgttaagatcttaggcaaatcacaagggtgttaagaactaccatcttcgcaaaaggagaatgtgcctcagatattctggtactgctttgattttaccttcagtagtcttacctattttgagtatgcttagtagtactaatatgaggcttattactaatatgttaaaatttgtcttttaattaagtgggtctaaacgttttaatctttaatctctgacccaactagaacttttctaaacattttcataatagtctccaccttgtcttctgaccttcacttatgttctttcagggttcttcgtgtgttactagtaatagtaatggcaagtgtttattgaacacttactatgtgaagattctaactggcttttaataatcacatcagctctgggaggtagaaggtagggatcctccttgcttatcaggtgagaaaactgtactatagagaagttagcaacttttcccaggtcataatatgtgacagctaaagggagcataatggttggaataaaataaatctactctagttgtaccgaaggctcatatttgtctcacgtacttgatttggtcgaggcccaaggggtcaatttccaatgcttggattcctggatatgtagagttgtattaaaaatgctaaaaacctattatgtatcatacaatcatacatatcacctaaagtattatggaaatgaatctgtattattaagggaaaaaggcctgtgtgaagaacaactgaaacttcattttaattgaaattaaataacatgcatcatacactaaaagtgcacgttatgaccccatgaattacttcaggtggctttgattcatgttacatacactaacaaatatagaagagtgatataatgcttcttaattaactactaatggaagtttactatttaactgcttcttatgtaagaatgtaaatgttttctgaaatatcagaacttttcattaggaagcacttttaaaaatagcaaaactgatatgcactatgatttccatatacattaaattgaacttgtaaatgatgttataaattatagaaaccaaggggatgttcaaattagatatttgtctaaataaatcatgtatggattgaacaaatactcattgagaaataaatgtattccttttctttcaattatctaggattccttgtttatctcttcagaagcaaaatgtcttctgtccgttttatttccagttaaacattcttcagattatgtaaataagttaacttccaatcctcttatttctgtttatctcaccactcttctaatttagacgtgatcaatatcttatctttttgcatttcatagacatcaggatccagaataattgagtgagctcaaaacaacaatggcaagaatgatgttttcagaaaactcagcaatcattcgtttaataaatattcattgcctaccaactataagcaaagtattggctaggccatgtggggtatacaaaaatgtattaaatatggctcattctccctaagaacttacacctattagacaaagtacatgcataaaaattataatgtataatagaaaataaatacaagccctagaatgcacagttgaagtacgatttgcatttattataaaaagaaagatgaattggctgggcacggtggctcacgcctgtaatcccagcactttgggaggccaaggtgggcagatcacgaggtcaggagttcgagaccatcctggccaacatggtgaaactctatctctactaaatatacaaaaattagccgggtttggtggtatgcacctgtaatcccagctacttagcaggctgaggcaggagaattgtttgaacctgggaggtggaggttgcagtgagccaagatctggccattgcactccagcctgggcaacagcaagattccatctcaaaaaaaaaaaaaggaaagaaaagaaaagattaatttcctgttagctaaatcaaggaaggcttcatggagaaaaaaatatttcaacacacacttgacgtagcagtgggatcaggctgatgttagggaagaatgaatgacattctacactgagaaagagatattcagtatatatatgaagagcagtagagaaactaacaagtggaaatagactcaatttacaatacttgcctgcctggagtactctatacgttgactgtaagttgcagtttactcagaacaatcccactttctacttgtttatcctatgtaatcatttattgggcctccttttgctctcaaaaatatccttgtttggataatagattatcactctgttcctaaatgaactgccctgtgtcctatcccagtaaaagggtgcattcgggcccttcgtaactgcctccactacatggttgattgaaaccagagcttggcattaagaagttagctgaacaatcagatttctattcttggaaaacccaagaatttcagaatagatacagaagctgtatagctttaataacatgacagagttgtagccttgaaagctatgtacaattcagaattatgagggagaagaaattgaagaaacagtagcagccgggtaaatgcagaaacaaatgagggagacacctagggggtgactgaggcacaataatggaagagaagtgcagtgaaattgcttgaactcttactgatgagatttctactgttgccttgaatccaggaccacctatatgttcattctttgtcatgctcagagttatgacagatgctgttattgaattccccagagactcccttatcgtctcacctcaaaccttacaataatcccttctatctttctatccatccaagctggcttaagtaaagtctatgatccatattcctagtaaacagagaagggaaagagactgaaggcaaaggccccaattagtaggctattgcaatatttcagggaaaaggcaatggccatcacattgttgtcccaggaatgagaatagaaatgaaagaagataatgaaagttgaaaggactgggggggcttgacaactgtttagacttgaggagtcagataaaataggaagccaaagataattcagaatattttgattttgattttcatcaccaaataagatagtagtactatgaagaaaaaatggttaaaaaacaataataataaagagaactcctccaaatagtaccaagggagggagtttaatagaggaaattaattccgtaggtgatgagagtcctgagaagccaaacgagaaaagatcaaaacaacccagggattggcagtcgcaggaagctgttctcacttatggctggggctttaagcacaaggtgacatgagatttcagaatttgaagtcgtctggaggcagctaggatcaggtggggcctgtcctgttcggcaggacctgcaaccacaggaggaggatgcgtcaagcagaaagttggaacacaagaggggattcagccataagccacaaaataccttccagagcagagagaaggagaaataccctgaattccgtattttccctgccatttagttccctgctattgccacacattgacgtattccatccagagaagtccattggcatatgagtctgggaaatgtagttcccagggggacatgatcttaagggaaatagacaatgactggtgcaacaactgacctgtgtgaggcaggagggaaaaaacaggaataatatagtttttctctagatcccttcatgcacaaagatgcaaaagaaatgtgttggcttaatgagccattctgggtggccctgtaggtggctgtcctacgaataagatttttagacaaaacagagatgacttcaaatgtcacaagaaaagtatcagacaggaattaatattgacttgatctgtcacaggcgtcaatgatttgcattaagccaacgatcttcattgttaatgtctgggaaattgccagcagcattacgactacttgtgtggattagtgtaacggattcccccactaacattcaggaaatcatgtcaagcacagagtgcctatgtaagagtggttgtgtctattcactacatttcttggactaataacacacttagccttcctgaattgccaacatgtacaaaaccagattggggttttttagttgttcatggaactatcatttattgggtagctcctgtagaagcaagatacagaaactctaattaggaataagacagtccctgtacttcaaagagctctcaggggaggcacacaagtaaacaagcaattattatcatacgttaggataataccgtcatggtgataaccactgagtgatagccaaacacatggaagaggtacccaagtctaacttggggtagtcagagactgctttcaaggatatccgagtaagtgttagctaagacatgatacgtatttctaggagggaaattttcaaggcaaggtggagattgtgcagtgacgcccagagcctggattattttggtgactgctagtatttcagaatgacttcagcaaaagttgtagagaagatagaagacaacaaagtataagcagaggccagataatgaggacctggaacagtggtttgctggtaaatgtttaacaagaggctcttggcggggagagagagtgtctgatttgcagcatttggcaaattttgttgcacaaatgctccagcatagccaatttcaagctaccagtgtgacgtcattgaatgcagaattggaaagaaacgggcagtagcacagcattgtatagttattttcattacccagatataatagataaaatatccagatggtatttaatagatatggatgcaaaatttaaatatatgtacattcatgtgcttcatgttactgaatgcgcacaacattcattatccattcattcacgtgttaatttaacaaacatttctgagcctctgctctgtgccaaacgcagttctagctgctggaattacagcactgaaaaaaaaaatttgtcctcactgaggtaagacaaacattattatgcccattttacagctgagaaattaagacatatgaggattaagcagtatagttaaaatcacacaattggtacatgaaggaatcaaagaggaaatcagctctcagattttaaatccagggactcgtttctgctataccatactacctacctagttgagctggattttatcatggtttccctatttttatcaccatgtggttggataagtaaaataaatatatgtgacctttcaaataaatttgggtcatttttcttggaagctcatctggtgtgaactttaaaatactgcaattaataatgattataataccctggaactctgtagcaacctcttttgaagaactccaaggagcctctaaatgtatcaaactaagttcttcaagtgaattagttatcatctgagagtaatatagacttttaaaaatgcattaattgtattaaccctttcaggcccatagacttaagtgtttctttctccaaataaaaatagtaatctctgtccattttctttagagaataatgaagtaattttcattgaatatgtagtcaacataattacttcaattcaatcgtgaaggattttaaaaattatttatgtctactaacttaaagacatgcatagatttcaagaacttaaaaatgcatattgcctctttgccctatgcctcataaaacaaaattatgataacgttgtgtgttacagaaaaacgcactgattgtaatgaagggtgcttcaaaggccatgaacttggaaagcaacttatttacagagacccccagcaatagcagctaaaagattgactgactccctttattttcagttatccttcagacacttttgacctcttcctgtgcctttctagtcatgtgcaatcttgtggatatctcttccttcctcttgttattttctatttcctctgtttctatttgtttctaaaaataatcatgtttgaatataggattagcttccttcccatctccccattaccaatctctcactataccgctatgttattaatcttcctgagaaatatatcaggttcattacattagttaccagctcaaaacgtatcagtggctttctagtcctcacaggctcaagttaatctgcatattctgactttcatattctgggttcatgcaaacttttcaactttccctcttatacctacttaggaggaccctcaggttccatcatgctcatgtttcaagccagaagttctcctgcctcttcctctatgtagactccacatagactatgatatcctgcttctcttttaatcctccatcttcagctcacagccacactcctctgtgaacagttaaatgattctcccacctcttacctcctatagcacttatttttcatgcagcatttttgagacttaattaaatctacagttttaaaaaatgtttttctaccacagtctcttattcatactaaaactttcaagtctatccattttgcttatacaaccacaccgttaggtcttttaggtccaagaatacaagagaatggcaaagcacgttgtttacatccacacatactgtgtaaattcaggtaattttttttaatcctatgatcctcaattacctcacctgtaaaataggtactactcatactgcagaactcttgttggaattaaataaatgagtgtattaaaaatgctcaacaagatttggcacaaaatcggtactcagtaaatgctaatcattattccctttctcttcaaagctccacaattctgtattcatatcaccctctttatatcatttgcaaaaatgtatcctattccaactctttccacctagcctcaacatttacaaacactcctggtgggaagggaaagcttttgaggagagcacatctatactcatttacttctcagggatgcaagctgccctgcttactgagggcatatgttcatagtcacaccggagcccactgtccccttatactctcaaatgggcagtagcaaatcatcttgatcggtagtaatgacctgtctctaaattttcacatgcatcagataatttcttttttagtaagtgttatcttacatatatgccaaaatatcaccattatatggaacactagctgaaagaaaaattattcagtagtcttaattttctagctaacataaattctctccattttcatcatccatttagattaaagactttactgttagctgaatattcagagactttattctgatttttaaaatttatgaggttcataatgttaagacttcaagggtgagctgtttgtgtcatttataatgcgtgactagacagtaactagaaaatggattgttgactttacaagatttctccccaccacgtccccccaaacctgtgctgctgtgtatttggcctgaaatctttacttctagtcaatctttggacctaaagcctaccagcttttagcatcctttaagattgacgtgtctctgggagaccaatagatgctaaaccaaatttcgtatgcacttggcaatataggataataacaaccatactccctgcaattgtttcctaacacagatgtaacaaattaccacaagctgggtggcttaatagacatttattctctcacaaatctggaagctaggtgtccaaaatcaaggtcaattatccctctgaaggctctggggaagaattcttccttgcctcttccagcttctggtagccccaggtgttccttgatttcaagcagcacaagttcaacatctgctcctgacctcacataaccctcttctttgtgtgtctttctgtgtccactcttttctttattattattattattattattattattattattatactttaagttttagggtacatgtgcacaatgtgcaggttagttacatatgtatgcatgtgccatgctggtgtgctgcacccattagctcatcatttagcattaggtatatctcctaatgctatccctccccccctccccccaccccacaacagtccccagagtgtgatgttcccattcctgtgtccatgtgttctcattgttcaattcccacctgtgagtgagagtatgcagtgtttggttttttgttcttgcgatagtttactgagaatgatgatttccaatttcatccatgtctctacaaagaacatgaactcatcatttttttatggctgcatagtattccatggtgtatatgtgccacattttcttaatccagtctatcattgttggacatttgggttggttccaagtctttgctattgtgaatagtgccgcaaaaggacaccagtctttggatttagagcccaccctaaattcatggtgatgtcattttgaaattcttaactaattacatcttcaaagaccctatttccaaatctggtgacattcaaggtttcagggacatgtgactattcaggggaaactattcatcccaccacatcccccttgaaaattctggaaaatgtagtaataaaggcttctgataaattagtgtggaaagtattcacggttataaattactaaaaagtctcactgtgagctcttaatcaaaaggccctataaaacatttatttgcttgattaaaactacacatccgatattttggttttggatttattattatttttagacttggaataactattttatgtgaaatagattccataactgaagcagcatacctctcaatttcccaacatttattttattattttttgtcttcacactacttaataactgaggaaaaatcatttagaccaaagttcaccttggttgacaccatccagacagctacaggaaataacaatggaaactaaatctctaagaaaaagagtctttcatgtgaaatattgcagagttgattctagatatatagctgttggaagaatggatactattacatagatatggcagagtggtatccagcacctttcaacaaagatctttcagagtcagtcttattatgtctggagaatttacccagggcttaggtgcttttactgacaatctaaccacctgcaccccacccaccgtctaaagctaaagtttattggaagacttaggaaatcagtcttcggaatgtttctgagactggtacacccaccacttcattaaagtgcttcacttcacttcattagacaagaagtaaaatacttgtcaggaaattatttatagtaccatgtatatgggtatcttatttaatactacttaatgatggtactacaagttatataaaatggagaaataagtcatcaagtttgacaataatgatatttgatattatcattatcttttttattcgttcccacagaagtactctgttattggtttagaaaaatgatatttgatataataaagaaggaaaaggtggtaatattctttattttttgtatctttataccccagctctttcaccaatctcccccatctctgtagttctcctctggtgtccccaggcagtgaactattcccagtggttagggaacatctcattgagtaagttacatcaacatttcttcacatttcaggacaacaggaacagtgccaaatcctagcccattgttcaactctcaagccttattatcctaataacacatccatcccaagaaagaattcatcaagatcagagaggaatacgtataattttttatagtacagtatttaaaatgaaacagcttttggcccgcgtggtctcagtgggctcaagggggaaattcaggatgctagctcatctcacaccaagtttaataaagggtgtcctataaaaagctaatttcttgctggtaaattgctttttaagtaatccttgctgttgcaagagacccattcatagcgctgacactgggagccatgttggaaaggctagatatgctctgggagataaggtaagatccaggtggaatcttctctttacagaatgacaatgtatatagctaatattgtcctttgaggctagtttgcatgcagttgctggtatggcactgctcagcagcctgctgcagataagaatgagtgatgatgccctagattttaatggaacttttagagtgcatgcagcagtggggtgcagtcttcagcaaagaaaaacgagctgacttgcaggcatgagagatcatcaagaaagataaagaaataggacatccactctaggttaggcaaggctttttagaggatattatggaaatgagcaagaaccaatttaatttttataatgccactccatttaactttaaaatacaaggtcaaggtactgtgtttttcataatgattaaagatttggagcactctttctgttgaaacatactgcatctgtttggcagaaaaaaaaagtgacaaagaataaaactgggatcagagaacaacaaaaacatattctgtcacttgcctaacacaagttaaaaagcaaaggaaaaagagacaactctgatggacatgttcatccttatcccaacagaaggatttatttacctaaggtcctattatttcaagttactttgatcccaggatggtaacataaaatgtacattttaaaataaaatggaagtataagatcaataaaaaccacatatctgtggataaaacagcagattcaatcttgtggctgaaagtttgctttaacccaacatttggtaaactattcactctgtaatttattaaaagacatactgttattataaaactatctcagtttgcatcttgttggttctgtcaaaatttcatcctgctaattctcaacttgtaatatctctgatatacatgattaatctattttaggaataaaacaaaaactacctttatcttacgcatttctaggaagtgtttttagatgtaaagtaggggtaattgtagtatagtggaaaggattttgaacttgaagccagaacatatgtctctgccaaaaactaggtgtgtgaccttaaataagttacttagcttcctgaatcttagtttgtttagcttttttctataaagtggcacacctatccacatcacagttttgttgtcaaaattaaataaaatactatattagaaagaaacttttagaaagaaatttataaactgaaatgtactatacaagtttaaatcattctcattattttcttaccctaaaattttgaccttatttttcttagcaaatggctgaatctgtaaaatttaacccccacgcagcatctggattcaagagaactacggtcatttctttatacagaatactaattatacacatatagcaaaacacaagttttttccaactactctgtgtttttaaagattcagtgtgggcagaaggaattttatcaactatgttaggggaaaaaagtctgaagaaatgaaaataatgagaaaaagcactgttgatttaagtgcaggaacataaaacttcaaggcaaatgtgaggccaactgagttcatatatatcctcacaaaatgatttagttaatttaaaaacttttctaataagcaacacaggtaatcccaaattctatcttttatagctctaagagtccccataatttattcagcaattatttaccacccacttattataagaaaagccctgggataagtcttgagaagaaactaacaaaaacaaaacttgattgtttgctctcaaaaagctgggtctaaaataggcaaggtaagattttgttttgaggagcccgtattttccagcactgtccattgtaacattaaaatagtttgccaaaatcctcactctgtgggtgtatttgcctagggtgctaaaattgcttaaaaactttgttatttggctaactaaaatcactgaatagtaaacagtagcattagagatggcagagacattaggtgtcatgcagttcaactgcttcacctagcagacaaagacattaagttccatttcttaaatttaactatctggttgaggatacacagtagcagagctaaatcaagaacctcttggggttagagtttttgtttatgcattactttgttttggaattaaaaacagtgcctgtttgctaagttaaattgaaaatatgctctgaaggagaaaaacagctataaaaatagacttaacttccaaactatggatcacaataaactaaagaaataatttctgtagcaataaactccaacactttccataggaccagaaaggcttgagaaagaggagaacaaaaaaatgctttggggcttaccatatatatggagaaagctaaatgaataaaccagttgaaagacagcgagttatactagtaacaatattactgatatcggagctctcacttataaattgtatattatgatcatagtgactaggtactttatatctgctttctcattccttcctcacattaattcacatgtaggacagattacctcttctgtttctatccagaggcctagagctcaggccctcatcgaagacagacagagctatcatccttattctaaaaaaaaactaagaccccagacatagctgtgctacttatagactagaatgtgagagaaaaagacaagctttcatcatgggcttaacaaactgaaacacttcttcaattttgagattgagaaacttagctaatgctaggtgtaaagatgatatgctaccttcataaccttggtgaggagaaattagcatttctctcagtcctagaaggaggatgaccatgaaggtcttcattctcttgagaagataatcaaatgcttcactgccctgttaacggtttactcaatattcaccaagaaaagtagatgggattatttttgcagacacttatacgggtaatttattctgataagcagagacatacctttagtgcataaattgttccctttgtgctctttgtaataaacatcaccatagagaacaaacacgaagtaatgacattgaattaaaagacaccatagaggcaacagcgactggaatttgtgaaagtaaaaggatagtgcaaacagttgtgcgttgcattctgctctgaagattaacaagctgggtcaggctttgaccatcatgatgagcaggagatttttctaatggaaatccccaatcaagttcctgctgcacccagaaaggaacggcttacagaaatcttacatttctttgcacataccaaattgcttggcatattctatcacaaggtttactttccagggaatgtgatcaagaaatcatgatcctaattcctagttaaccctcaaagtttctcagaacagtcagtgcatcactgtcaacttttgtgcaatgtggaaatcagaattggtcacacgtttttccggccactgttttagattcatataatattagtgaaatcatgtcagactggtatagccatgaatttatacttcatgaataggcactcaataaatagtggattaaatcgaccgatttgatttttacctccaataatttcaaaaatatcattgaagacaaggttgttgaagctgtcacttttcttgctgaacctttgttgtgccaggaggaacagatggtaaaatcaaaagtgattagagaatcagtggggtgggggtgagattggaggggagaggtcttcccagtgagacccgctagcgtcttccctgagcagtatgttaacccaagacaattttagaaatctgtgcccctaagttgcttgacatccaaagcacacttgatgcatcctacatttctaaatatttttattgttgtttctcggtagtaatcatctggtttagtcactctaaaagtcaaggatgaaattttaaaatgcaaataaaagtgcctactttctctctttccaattcctttttgttttattgaggtataatttacatgcacaaaaaaatcgcctttttaaagtgtacagtttgatgagttttgacaaacatatgcagtcctacaaccacgtccgtgatcagaataggaaatatttttatcacttcaaaaagtttccttgtactcccgttgcagtcagtctcctgccccaccccagcccctggaaaccactgataggtaaaagcacttttaatctgaaaggtatttaatgtatggcagtgtcagtggtaataataacaagatttattcattggttcactgtatttttgagcacttatatgtgcccgttgtatgcaacccattatgctcaacccctgccctcctcaccagggataaactagtggcagagatagacaaagaagccgtctctctatcacccctatcttatagaacattcttcaatgttagaaatgcagtataatgtggccattgagaacttgaaatgtgcttagtgggaatgaagaactgaagttttaactttatttaatttcaattaatttaaatttatatagccacatgtggctaatgactatcccactggaaagtacagcttctatacaatatgataatatgatacattataacgcaggagtttaaccaagtgctaaagctttactatcaccagggtcactggtgttatgtgaaaagaaaacttacaatagaaaaataaatcctttaaatagtcacagacctgagaaagtttccttctcaagggaacacacattggctcattcaaaggaggttaaaaactagcatttaaggtaatttcatgaagctttcctttggatttctcatgcttattgtatacataaataggcaattttcgatgggacctaataaatcactgttttttatttgaacattttaacaaaattatcaaacagcattgcatttatgttcaacctatttgttctgagaaagacaacgattaagtagaagtcatcaaagttaccagaacaatttttgttcttatgttttagaaggcattgaaggtgtttaaaatgtacacttatagagtcagagtactatgcaactgtggcccttatagtttatccgtcatgcatctaaagccattgttacatctgtttctaattgtgcatggattgtccaagatacacaattggaaattccattttatttatcaatttgaagaggtttcacccatgtggtcactatgatcactatggagtcacattaaattgagaagtctccagaagttgcagtatttatttaaaattctaactttcttcagaggaacaaattctccatttctggattctgaatcctcattagccataaggttgttgtaagaatttgcagctaataggaacacatcctggggagagaccagttgaaaagtaacttggttctgagtgaaattatacagagacagtttctacttcaggtggtgttgctaatgaagctatcatggtaattttagcccatatgatccctaaacgacttcagaaccacttttcatccactaagaacccacttcaaccactgccacgttcactaccacagtataatatggaacaccctctggaattcagtaagtaacttcttaactcattggctatagagctttgcctttgtaaattctttccttttgcagtaaaagagattgtttcaaagtaatccaattagtccctaggcatgtctagaaaggtagagtcaacaacagtaaggtaatagtccttataagatatgtaagaaattatcagtcatttactttaaaataatttgtacacttttccttttatatggttcttctatgttgaagccagtggtcatccagtgattaagattagccaaactcaaaaggctaaaactaaattcaaatggtattattttgctttaattttatgcaatgctatgtatttaaatttcatgaaagtttcgtatggcattgctatcaatttcagtcaggataaatttcccgtgaaataatccacaattttcaactgtacgttgggtacaggtaaggaaacacccttaagagcttatccagttattagctggtattataaatttcaagtaattcaatgttcaattaataaacagttactttaaatgggaaagtatgagtcaagagttagtacaaaggagaatcttaaaagatgaacatcaaagaatcttactattgatttgttggtgcctttgcttgcacttctccaaattgacttgacgttttaaatttgtactgataatcatcagagtcaaatctgcttttaggcaaaaagtatccgctagttattcccctactatgaaagtgatgagatgaattgatcatgtctccagtgtatggatggatgtctttgaggaagacctactgaccttatgtttatcttctgtcagcatggtgtgactatgtggagagacagtgctatttgctaaatactttgtttttcaaataaaaagatttcacagattatgcattgtagaatttataagtattcttttatgtctttgaatgtgccaatacaatttttatgaagttggaactattttatctattttaatgaaattgtaagccttctgtgaattcttttattaattttattctgaagaaaatctgaccaggttagggaaatcaggtcaggttacgacgtgatcccagtggaaaagctgaactgtggactgtgatttaaaatagggaagaggtactgaagtgttgtttttatttttgtttacaaatcagcctttctaactattatgtactcccatccttctatctttttctccaccagaacgtattaacaggcatgcatataattaatgcttttcttgagataatattaaaattaacttcatctgtcaggccgtctgggctaaaagtacacagtcagatctgggtaacatttgagttgatgtaaatatgcccacacatactgacaatgcttaccatttattgtgtgaatgaaaagcagtgtaaatattgtttgttctactagggaagctccacattttaatcaaactttgaccgtatttctaaaatgccagagcatctggaattgttaaaggaactgatagtttttgtgtttttaactgttaggatacttgaaatccaaagggtaaagaaactcagctgatttatacgtttcttcctctttattttaatgtgataaaatgtagtttttgtcatgggctgacaaacagtggtagactacactaactctgcgtttgctgggtttaatcttaccctctcaaggcatggaatgggagctcacttcagacccagccatgcttcactgtccactgccttctcatggatatagtgtgaacattaattagatgaattccataaagtgctttaagctctttggagaaagatactcgctgcataattattcttaactcccatacgctcttatgatataaaccattctgccaggaaatcctttttagggattatcacttaaaatgaaattttcattattaaaagcaggaagaatatacatctactgacagacgaaaatgtgcttaaggcgactgcttttaaataggcagaaatcctgaactatggagccatccatgcctgaaaatactgagtaataatgaaaactggtagcaaatttggaatattaatcatcacattaagttgcaaagaaaaaaaaatacaagccacatgccctttaaaaatacgtgcacaaatctttattctagaaatatataactttaggcctaaaaaagtacaaaaagtaaattattttatggctctgaaagtatccttaatttactcaggtgacaacaattagtgtttaaagagttagttttcaatcttagctacaagttggaattactctggaagctctaaaaaaacaaaaaacaaaaaaaaatagagatgcctagttcccacctgcagaaattctgatttgatttttctggtgcgagacctgagaataggaatttttttaaagcttccctagtgattctagtgtgccacctaggttgccttaaggtaaacctcatattatgcagaacctagcaatcacctatcctgattttatagacgaagatcataagacccaagagggcaaattgatttattcaagattgaatatacaaatgatagaagattcacataagatgcagtatacagagtggcttgtggattcttgccaatgcaggcagcagaattttctttagggttcacccagttcaggcacctctttgcagcagcacttgactaaggttcttctgattggatcattatatgggcaaaaagaaaaagcttaattgaaaagagctgaacccacattgtggaatggaagatatacagtttacacgttataaatgattaatattcatgaaagcatactgccctttcctcttcccttcccatagatgacatcattgcattggtgtagttaggttggtggtttcttgttgttgatcttggttctgacacagttcatcacttattatcctggcttattatctacttctacattcattgttcactcactcactaattaattcaacatggtttttattgttttggaccggttatatgcctgcaacgctacgtaaggctgaggatattacaatgaacaggaaacaaccctgaagtttaaggtatcaagcctttgagttactgtcttttatcatagctgatataaaattgaagccccactttttttgttttcaattactgaaaattcagtgctaaaaaaatgtggatttttattcaactagataaagtactacaattaggtttccactgaccttggctgtttttgttcccagttgccattacataaatctgtgccactcacaacttaggaagggtgtaacattctctgtaatagtttgcctttcgaatagtgtttggattcattactgtccctcgcagtttggaataatgaccactgaataatcagtgtttggagactaaattagtgctgcaaaattccctcaaattacctactgttcttttccctgtcgatgtatcctcatattcactatgattaccctgagaagaaagatattgttgagaaccactttacctactcgaagttttggtatttcaaagattcatacttatgtcatgttgattacattagcactaatactattggcagaattctaattcacgttattttctttttttccaatttctctccatgcctatgtgttgtcccttcgcagctataaagccatggccgattcatgggtgcttttgttaaggcgttcagcagtcacgtttgtagatttttgaatgggacttagagcccttttttgttctttatgtatttctctatttctcagcaaaggaaatgcagacatgcaagaaatagtgatcaaatgtcctgtgtactattgtgggtgtcattaatggtatagggagaaatagaaaatagttgcaaagatgcatttaacaaataaacgaggtcttgagattcaccatgaatgtggccccttctatgaaaagtagttaacatccaactgcaaagttgtactggatcagtttgactttaacctttagctaatatgaaaatatggaattgtgtggtggtgctcacaaaaaagaaaactcatttttcttaattatcatcaattaacatgtactgactacccatgagggaaagttaatttgctcttgagtggaaccagttatttgccctattatttctcccttgcttattcccctctccctccctcctccctttccattcaacaaagaaaaatagataaagcaatttctgattagccagtgaaagcctctaacataaaatttccaaagatgtgccataaattatccacaaaatgtaaaacttttcaattttggtttgcattttcttttttcttattataaaggtaataagtgctcattatagaatttgaaaaatataggaagttgcacggaagacgaataaaatcagccataatcctacaaacctattgacacttgtacatatgtttgttatctctaatgcattcattatgataatgcatcttttcaaccaatagagtaatcactggtgactttcaaatttgcctactcatttttcactctgtggacttactttactacctcttgccctttttcagtaaatgaataaatatttaagtaagtaaatacaaatgtaataacttatgcgctcaagcacacagatacacacagagagaatttggaacttcggaaatgccatcctctccctagggccgcaagtgagttgataagcacgtaaggaaggataatcaggggagccttctcgtattgcccagatggctcaaaattcgtcatctctaccaaacaactatttggagctttgaagaaatatccatgacccctttgaattcttcagtttctttcgcgttcactttgagaaccaagtgacaagtgaatttcctgacttggtcttttaaacctgttagcgcagttccattgagattttgtgggcacaagattgcaatgaagagatcaacagggagaaattcatttccctatatatgtgcgattaatccggagtgctaagggcagatataaagcaggtgcctactcctgtataacttggaataaaaccatttccaaaggctgatgatcctcaagtcttgttctgcaaatgactgatgtataacttcaggccaatttttctccagttagtctgtgtcactgggagtcccatttctcggggagcagccccatgctttgtcaggtgcggagcccacagaaggttaatgcgaaaagaaggcctcttgccagactgttttccagatgatacgtagggttattagtttgagctccttaagaagatttttctcacctgtcctaccaacttatgtttatttcattggtgttagagggtttcagtggcggaagtaaaatatttagcggggaagggacagcgttcatgggaattttgcctaacttaattttgtatctttagctcattcgtagtcattgtactttgtgttttgtcaactgaattttgtttgcatacaaaggcacaaaatgtttgcttcagacctgtcactcttatttttagcatggttagacaaaaactgagatgctttaattgtctaacttatcccagtttaagtgctgcaaaatctcccaggcaatgtcatgggcaactaagggataaaatcagagatttaaaggtgccaggtttcccacgcttctaacagttggcgttttgggtgtatacaatccctcagctttcttctttagtttatggagtcttgtggagggaatagcaggtttttagctaaaattatcatgctgtcgagttgggtctctagtgcatcctgaagagcttgcattatttacagaggctgggctatcattttaaatcctgatgcttcaatgcccgttatcattcttgacaaactcttccagcccgtggtctgttttcctctgtttgcttccatttactttcctgagcaaccagctgagcaaagatttacataacttttgtttaaacaaaccctgtacagttcactctttcagccagtatgtaaacacttttgagacacagttacatttttctattttagtcccagattctgtttatttgctacattttttgtgcccacatttttgtctttgttaagtctcttacagattcacatgaaaaaccagaaaccgtggctgctcaaaagtcattaataatgagatttttagctactgtttctgcttgtaaattcttcatttcacataatacagtctcaaaaggccacagagaattcagcctcgcttatctctgtgttgcagatgatggcttctagccttacccaatcccagtgcagcttgcttgccatccaggagtcgaatttgtttccatctgacattagcgtattaaaaagattggagatcaacaagcaacaatgttcttgtagaaaggtaatcaaggtttagagcctgtgtgtcatgagactcctagcatttgaaaccgctaaggggttgaccaccattgtcccaagcacctgtttaagattctttcctatgataagggacctaaagtgattagcatactgataagattttcctagaataacctatttatttcagtattattctttcaaatcttaattaccatcttttcctttacccagggtcttctttctacctctacgacacatttaattacctatattccccaacctgtaccatattaaattttgaatggaagttttatagggtaatttattggaaggatggccttgagtgtcattatgttcaatgaatgccctattttgacaaagagatgactaaatgttattgaaatctttttaatccaccacgcttctgcttagatgtaaatgcaaatctgttctttacatttgtgattgaattgaacttgaaaagtaccgccatattgattccttctgcaaataaaatataattacatttccctaaactttctacactctcccaagagattggctggctttgtattgtagatttttggtgatcacagaggacaatgcattatcataagaccaataagatttatttttaccttggtaaagaattttaatttatttctagtttcattttcatttatatccatctcttctcaccctctgctctacaaaagtatatatgactatataaattgaaaaaaatatcaagtgcaaaattacagaaataaataattaggttattttagtggaggaaggtttgttgtgggtggaggaggagaggagtgagccaagaaaaacgagggaccatacgtgatcatatttttgcagctattttaaattgtttgtgtatatactttaaaatattataaaataaaattttaagtgcaatgcatatttggagccaatgatgagggataacttcagaaacgtagcatcatcatctagtgctttcatagtcctttcaacatttccagatagttttaatggcctgctcatggaggcaatgccctaattttaacatatctcttcacaactctgatttcttgcttcctaacattaaatgtcttcaaagcttctttcaccactaattccttatcaagaggataagccagtttattctttaagaaaaactagctacacaaaaccgtaagtcattccaacataaatccttcactatcctctctctatagatttggttttgattcctcctgctgaaattcaaccttctttcttcagctatccacacgtcttaccctctaacttccctcaggagtgtctattagctcccattacagtgaccacagtaatatagtaatcccctgctgttctcactctccacttccttacactgcgttttaagtctcttcatattctttatcaccttgtatcatgcatcggttttcttagttgtttattttatgttgccttcataaattccatgagagctcactgccgtatctttagaacatggaacagtgcttggaacataatgggcattccttaaatagctgtagaataaactttcaaaatcaacaataatgtatttgccaaatccattggcttctctgccattttatcttgttcaataccactgcgatattccccttcctttttttttttttttaaagtctgtaaccctttagcttctgtaatattcctagttttttattcctctcatgtgtcaaaatcatcagttgaggcttattgttttctctttctcactctgacctcacctttgtttacatctcatcttctggctttggctatcctgttttttatctctgttccaacctgtatttctagccctactacctggacatgacatgtggatatctccgtatgaccgcagtttccatatgactttgcaaattcatccctgctctcccctccaaagtcatccccacaattgacttcctgttccttccaacctattaaggttcaaacccacttttgctcctcctttgcaggctacacttttccttctcagtacctcttttttttccaagttcttagataaaagtcatagtaccttacgttgtaattgccactggtctggtctttctgcctgctttcctttccatttgtaatcacattatccattccaatccatttataatactgtgatcagccataaaaataacatttatcatatcgtttgtctccttaaaacctgtagtagatcccctctatttacaagatctggtataaaatcacccttcctgatattcaatgcctgttttaatataatctcaatattatgcgtcataaatccccctgtgttcttgcactttttatttcttatacatctcatcaaccatgtcttatcaactctcaaaacctgtattggttttcaggaaaactcataaattattcttttgtagaccttttgtttgtcatctttgaagatctctctctgaactacaatattttgtctgtataatcaatttggaaattcatcaggtattgaaatatgacatgtcttctattgtcttgaacattaattaaaactttatttgactttttatatgcttacatcttgtttcctcacggagtgttaacctactagaaagtaatagtttaatcttatatttattttaattcagatttagtagcatactttacacgtggtaggatgtgtaactgccttacaccttgcttacgtgagttattaatgttttcgtatatttaatctgaggatgtactagcaatgttaaaactgtaccgcatgaaattgagtaattgaactatttgttttaaatgtgttgcttaacttattgtaccattttctcataatcacagctcaagttaactttgtggttgtacgtattatttcttgtgaaatgccaacaaacttagagcaaggaaaataacaggtataatcatactataaaggcaaccttaacactagcatagtctcttagctcatatggtaactacaataatgtacagtgacaaagagaatattgtactttcttagcacacactttcctactactctactgttgtggataaaaacagacatactttaggagaaactatgttatttccaaataatgccttaaaggttactccaggaaaaggcatttacataaactatctaggaaaagaaccttttaaataatataaagagctcacccaaaaggactgaagtgtttagttgaaaaaaagtaaaaatgtcgaagactttgaaaaatagtttcttgcagtatattttcatcgcttccacttacgttatgaagacattaagcgctagtttatcaaaaactatttttgtacatgtcttctaatgacagaacaatgtcaacatgattttcatcattgagaatgcgtaaagaaaccctttgtacagttttttctatgaatgttcccctaagattaaagcaaatttccaacacgaattaggcactccgaaaggaggaggggagggaggggagcaagtgctgcaaaacttcctgttgggtactatgttcactatctgggtgatggaatcaacagaagcccaaacctcagcatcacgcagtatacccttgtaacaaaccaacacatgtacccctgagtctacattaaaaatagagattaaaaaaaggaaatcagtatataatctaataaatacctctcaagctttctcatttttaaaataaaattttagattattattttaggaataaaataggctcttcattgtatataagttcatttctgagttgcaaaaatcctctctttatgtttttttccccgtattagcatgtttttctcctgtttttccccactcaacttggctgccacaatcagaaagcacaaagacaattttttcttgcgcttgtaaatcaaaaccttagcatcagacaaaataactgctccaggtctgtcaaatagattcatttgagctttcttcatgcattgaatacggcagaatttctgacctgaagaaatctagccttttccaaatttgctttaagaacattttgcaataaatttaatataataaaaggaaaaaacacatcaggctagaatttggaaccgattgttattaaaaatctcaagtctatcaatttaacttcaacaaattacttaatttctgtgatggttaatttcatgtgtcaacttggctgggccgcagggtaccgagacatttggtcaaacattattctgggtgtgtttatgaggctgtttctggagagattcacatttgaatcagtagagggagcaaagccgattgttctcccttgtgtgggtgggtctgatccaatcaattgaggacctaagtccaatcgattgaagacctaatcaaaaagcctgattaaaaggaactcctgcctgatagctaaagctggaacacccatcttttcctgcctttgagcttgaattgaaaccttgggtcttcttgagtcttaagcctccagttctggggctggaacttaacgtcattggctttcttggttctcatgcctttggactcagacaggaactacatcattggctttcctgggtctccagcttgctgactgtaaatcttgggacttctccagattcgtaatgagccaatttattacaataagtctctccctctctggtttcgagagagagagagagagagacagagagagaaatgagagcacaagaacgtgagtgtgagagtgccctaatataatttctctaaatatcactggttactcttcaaagttataaaattggtataaaaggtgacctcaatttttcatggagttaatgtatgaaagtcacaattaaaaaggaagaattagttctggtgtcctgaaagttatttgaataaattaatatgctatggaggctttaaaatactatgaaaatttaatattgtattattcttagtgttgctatttttaaatagcactttttcttttcctttttttttttttttttttttttttttgagatggagtctcactctgttgcccaggctggagtgcagtggcatgatctcggctcactgcaagctccactgcccgggttcacgccattctcctgcctcagcctcccaagtagctgggactacaggcggccgccaccacgtccgggtaattttttgtatttttttagtagagacggagtttcaccgtgttagccaggttgttctcgatctcctgacctcatgatccacccaccttggcctcccaaagtgctgggattacaggcatgagccaccatgcccggcttaaatagcactttttcttgtgagtcactttttaaatatttgtgcaaaccttgttgccattctactcaagctaatatcctaaaccgaggacattataacatttcaggagtcaaaacttcagacacttaacatagtatcctcaggttcatccatgttgtcataaatgacaggattttattcttttatatgactcaataatatcccattgcatatatatgcaatattttctttattcatccattattaaacacttaagttgattctatatcttggctattgtgaataatgctgcaataaacatgggaatgcagatatctctatgacatactgattttatttgctttgtctctgtccccagtagtggaattgctgtatcgtatggtagttctatttttaagttttcgaggaacctccataccgtcctccataatggatgtactcatttacattcccaccaacagtgcataagggttcccttttctccatattcttgccaacactttttatcttttgtattttgataatagccattctaactggaatgagatgatatctcattgtggttttgatttgcattttcctgatagtgatgttgaacattttttcatatgttgtattaactaagccaaacacagaaagacaaatgcagcttgttctcattcatatgcacaatctaaaaacatcgatctcatagaagcagtaaatggacggtggtcaccaaagaatgggggaagtaggggaaaagcgagaatggggagaggattgtcaatgggtacaaagtcacgattagaaaggaagaattagttctggtgtcctgttgcatagtatggagactattgtcaacagtaaggtattgcgtatctcaaaacggctagaagagagggttttgaaggtttctaccccaaataaatggtaaatgtttgaggtgatatgctaattttcttgatttgatcaagtaaaggtcttaattgtttggcaattaagactcatgaatacaaataaaggtcttaattatttggcaaagcatgctgagttttgtaaacaattcagtagtgatttttgagaataggtcaatagcaaatattaattaaaatgtcttctatttatgacctacagctagatggtaaacagatagatgatagatagataactgatagataactaatagatgacagataaatgataaatagataaatatagataatcgagagagaatacctttcccttcacacacgtgcatataggcacactccatttctatcatagttaccaggattcagacattttgtctcactatttttctcaatgtgaacatgcatataggaatattatagtttttgttctgtgcccattttagttcgttttttaatatttcaggacaaaggcaatatggcggtttcactttgtttttcatttttgcttatactttttaaagctcagtgtagaaaagtttgaaaatacacaaaagtattaaattaagacagctgggcacagtggctcacgcctgtaatcccagcacttcgggaggccaaggtgggtggatcacgaggtcaagagatcgacaccatcctggccaacatggtgaatcccgtctctactaaaaatacaaaaattagctgagcatggtggtgtgtgcctgtagtcccagctactcgggaggctgaggcaggagaatcgcttgaacccgggaggcagaggttgcagtgagccgggatcacaccactgtattccagcctggtgacagagcgagactctgtctcagaaaaaaaacaaaacaaacaaacaaaaaagcacctatagtctttctcccataggttgccttcttaatgggttttacaccttttgatgttttcttgagttctgtcccattagcaagtagtattgtacaaaaaaaattttatcatcttttatttaatattttattgatgtttaataattagaattattttaaattttatatgtcattttaaaatgcaatacaatatagtaaactcccagatgtgattgtaaataattaattattctcccattattgggcattgggactgcttccacattttggtcactgcagtgaacatccttgtacatgaatctgtatgttgaagttgatttcattccacactccccttcattcaaggggctccaaccattctcgttttctttcagcttctttatatccaggcatataaagttccttcctgactcgggagcgtcatacatgctgttttctccatctggataagtagttaattctgttcttctttgtgcatctcccgtttcagtaacttcatctccaaagcctttccaggtcactttatctaaagttacaccataatcttgcaaatcctcaactattgagcattattagtctccgttatcattattctccattattctctgtgaaagcatcccgtgattttcttttgtccctattaccacaatatgtgtttattccgtgtatgtacatctttgtttgtttattgtttgtctatacctgcaatgaaatgcctaaggtcaggaactgtctgatgcaggatgcaatgcgctcaataaatatttactgaacaaattaattcatttgctcagtcttgcaggcaaatggtacttctgtatatttaaatatctaaaatgaaagcgttactcgttactgttggttgtcaatcaaaatttaaatgtcgatgtttaagcgtgaaagacctctgtcaagttaatctgtacttacccaaaggctattatgtagaagcgacataaatattttcctaaatgttgattttcatattttaagaagacaatgaatgtttcaaagcattttcttctacacagctatttattctggagagtggggcatatgtttcttaatattgttaaaattggcaaggggatactgttgctatatacaaagaacacctaatcatcatgcagacgttttgtttctggctctcagttatgaaaagcagagattttaaaaagttacctttatatgctaaattaggaatggcagaaggtaatattctaatgtttataagtggttcttctctgagtccttggtttctatgtttatgaattctctttttgaaagaaattatagttattattaccaggtctattcttttacattgtttctaattctatggtgatcttcaaaatagagtatcaattttaaatacttgggaatgaaattattcttcccatatcatttctttgtatggcatacattgtgatttgttgtcccatcattgtttcagtatgacctgttactgcaaaaacatattgagataaatcatcccacatactctcggccaggacagacatcacactgttgcagcaacacttcagatgagccccattcaaccttgtgtttttatagagaaggatgccacatgtttatattcatttctgaagattggctcatattatttattgaaacatactagtttaaaaatctgtccatttatataacacctggtctatctacataacttgaattacataaatataaaactaaacttcccctcttctccagtgtatagcttgcaagcaagtgcatgtgaaataaattaaagccttgtttgtgtttttttcatcatgtgagtacaagacttttcaataaaaatgaattacttttgaacatatttgtttggacaacaaacaagagaaaagatctatttgattgatagtggacagaattttcattaagttcaacagcagaaataccacaattgcatcattcaccttcgtgtatcaaaagaaaacagaaaattagatgtgatgaactctacacaaatgttcactatgcatactttacccattaaatacattatcaagaatcatgtcagcatgacattctaatatagcagctttacaaaaacatgtaatctaatctagggatgctgttgtcctctttaaatcagcttcaaacatattctgggttgatatttctcattcttttttgatccacattgtttattcacataatgattatatttaactgaagataacagcattatcaaagtgaaagacaaaatagatgtttaataggaaagtgagtatcgaatcatcttttttctaccaaaaacatctataattatgaagtatttggttaattattttcacaataatttaaaagtgtacaacttgccgatttttttgtactttctacttttcatgtctcgcatatatctctttaatatctaagtatttgagtcagaaaagagccagtaccgaataatgggaatctcactgaaatgtgataacaatctggggcctggtcctgggacctttatctgcaggacaacttggacaaatatttagacccccaattcctcgtctttaccctaggaataataacacatttttctgacctcatacttcacgtggatctcaaatggaacaatcatctgatagcactttatgaagtatatgaaagcaataaattatcacaataagataattgcaattattctttggcatagtattagtgatgtctttatctgtctgacaaaatcaacatttctgtatggtaactgcctttccttgttttaacagaagatcatgccagaaaagatgagtaggtagatacttaacttgttgttcctgaatctggaatgtattgcagatgtcccagactgatctttgttcttttttttccttacaaatttcttttcacattgacagtgtgatatttctttaaatgtgcaatacatagctaaccttatttgtttgtgtttactaattaaaatatctaaactgcttaaaggagaaaattcagttttaagttttattgatttatacccttcttcaatccacataggattagggtagtatgtaacaaaatttcaaactataaatgaaatattgagttttgtattaaggccaaggatgaggaaaaaaaaagtaagtatatatggaaaaagaatggtattgaatgggagttttgatggagcatgttgacatcatgataatacctattatctttatattctgaatgtcagaacaaaattagagcaattttcccttatttccctacaatacgtctgtcttaataattctaagctttcctgatttcagtagtaatctgtattttgcaaaaggcagcatgtttataagatatcaagtaaactaagtttatggaacttgtaacagcatttttaacaacatttctccctagatagttcatggtagacatgaatttattcaaaactagtatgtagaaaaataccattaacaaaagctctgaaattatattagaggagctgaataatgttacttgagaaagaataaaatgttatttatgatttttggtatcttttacccactatatatggccatatctctgaaaaactttagtaatatgtactaatgcaaatatggtagtaaattatgtctacaggtgctgataccatagtagataaagtatgataactttattttaaaatatcatatttaaataattaatatacagtactgggaaagactattttatctattctctcactcttgaataaaaaaatccagaaaaaaataccttgttttggtaagattatatcaatttatttcccaaatgggtagagggttatttttttctgatcataaacgtatgtctcttcattataaaaatccactaaaagtgatagaagaaaaccaaaagaataaatgtaaacaatgatgccattttccaaaaatcaccttcgacatttttctggatattgatacagtctaaatctcttttcggaagactccctcctgtgtaggttccccaactactctgcaatcttatttcctcttgttctgttcttgtagaaaggagacccattgtcaccatgtcaaataacacaaaatggtgcacgtataagatcattgtctctgtccattatttgccagaggacctcaaactttttcaggtggtgggcaactggatgtcatgctgctccttgtacaacagaacacaattcattatttatatggttatttcattttaagaaaatttaactttcattagctggaaaaaaaaagaagtggtttttaagttgtttagaaatgtgaaattcaattttcatactgcaaaagagattcaactgcaaacacaggcacacatgtctggtgtaagaacgagttgtcatacaaacccaaattagctgcctccacgttgtctttgttaacaagtgtttgtttgctccttgttccatcattcagaaatgctctttagcaggaattgatggaacacagtcgcagtgacctcttcctgtctttaaaaatcgagatgacatttgcccatctgcagtgttaacatagttcctcaaagaccactgacagtggggtaggactgtattgcgcaagttctctcatttccctagaatataattggtccagggccagagattttagctcatttagagcagcaaggtgctcttttaaaattccctcacctattttgggcttcatttcccttatacggttatgccttttccagtctgatgaacattctccttgacagagcagacaagcaaaaggagctgcacactgctgctttctgtgtcgtctctatccctaaccttctcccttctgccccaatcagtgaaccttcgtctttctggttcttcttcctccaaatggaagtaaaaaggccctgaatgttgtctttaccattatcacgagcctcaattcattccaagctcagcttttcctcactgtttatacagttctatattgttcttctaatatttgccctcagttctctgtccctcgtttcttcccatgttcatactctattagaatctgagcacctttgaggttgtccatacagtggcacacatctttgttttatactcactgggatgatttgccattatattgtcaaaattttattctaaagagcttttacaggctttcttgagccattttctcttgaaattcaagatcgttgaatctctacgctttttccttcttaatctaataaacatacacccccacatacacacgtgtgttcctgaaagacagatgccacttgactcgtcttatagattgtctaaattgatcattgtgtgtggggataaaagggtgaattgtataatatccctgatggttcacgaagtctgttcctgtataacctgattagtcttctgaactcttttaaattctgtctgcaaatgactgaggtttggcaatcagcctatttcagttagttgttttcttgcataagaagggtccatatgtactgtgtgaagtaagagagagaaagtacttagatttgctggatgccctgattgttagcatggctaaggtattgtgtaagtaaggagagcagttaaaaatgatattgtttttatttcttaattgaggtaaaattttatataagatgaaacagacttatttgggagaggaggaagagtttgttcttacataacatttcaacctgtcatatttagttgagaacttcaatctgtcaagatactttgtataatattcagattctgccatctaatatattttccacgctttcttactgggtgtgacagtaacttatactgtggcaggtgtataagttagtaaagatattaaatgctcaatctgttaacttttgtgaagtggtcccactgataaagtgacacctcaataaaataaaaatttccattacctcagaaagctttttcatgctaccttccagtcaattcccagccccaataggcacctattcttctgatttatatcaccatagattagttttgtctttttaaaaatttgtataaatgaaatcatacaaaatgtactattttgatcagcatactacttttgagattcatccatgtaagtgtatcagctgttcattcctttattgatgattaatattctattgtatagatataccacaatttatttatctattctccttttgatggacattcaggtggttttcagtttttggctgttatgaataagatgctgtggacatttgtgtacaagccatttgtgagcatatgttttcatttagtttgagtaactctgtagaagtggaatggctgggtgaaatgtttaaatttatgagatattgtcaaacagcacctaaacagttttctaaagtggttgtgccattttgcaatgccaccagtgatgatggagagttccagttactctacatctttgtcaatatttggtcttgtcagtcattttaatttttgctatcttacagaatatgtaggtatattgttgtggttttaacttatattcctctgattactagcactattaagcatcttttcatggatttattggacattcatatagattatgtgtgttgaagattattacctttatgattattgggtgaaaatagtatcattttgaggtcattcatataacttgaagactgggaatgacagacattttcctgttttgtttcttttctttttactttatctgaagagtctactagaatgcagtgttgctgcctgagcagcagggcattagctttgtaaaagctctgttccttggcaaccccaccactaatatgaagtgcagaacatttgaattgtctttgaccagcttcagcatcagcactattttttttttttgctagacccctagtaggtatttaaaagtacagaaatagaatttaatcatgctttttaccaaatgtgctatgctcttagagattctttcaacgtgcataaaaattctgcagtttcaccacataccagtaaaagaaactcagtcactcatttagccatttagtaaaaagaacaaattaactgatgagcatagtggagacctcaaaggtaaagaagacaatgtccctgaaataaagacaatcataaattttcaatcaaaataatgaaatttaggctgggcatggtggctcatgcctatgatcctagcactttggaaggctaaggtgggaggattgtttgaggccaggagttcaagaccagcctcagcaaaaaagtgagaccctgtctccacaaaaaaattttaaaaattatctgggtgtggtggtatgcaccggtggtctcagctactcaagaggctgaggtggaggatcaccagagctcaggggttggagactacagtgagctatgattgtaccactgcactcaaacttgcatgacagaatgagtccttgtctctaataataacaaaatttaatttttatagactgtgaaaaaccattatgtagatacagttcaagtacagtatgattttataggatagataacttttgcttgaaaatgtattcccaatttataggatagataacttttgcttgaaaatgtattcacaatagagttagtatttggggcacacctttatccatttaacaaacatgttttgagcactgccaggtagcaacacgttactaggcactagagtgagaaaagattacagttcctgctctcatggatctcatggtctagtcaactggaatgaaaggattacataagtagaggtaaagacacacatgatggaggatggagaatagtcaaaggtctggagaatgaccaggacgtcactgtgagttgtctaattgcactgaagcatggatgaagaattggaaagtcattgtaagaagcctaaaaaggtatctctcagggatgctatgaggttctgaatgttatgtacgctatttgggcttcaacaggcaggcactgagtattcagtataaatttttgagcagggaatccaccagaagaactatgcatctggaggattaatctggaaagattgtgtagaatgttatgcagtgaaagagtctgagatgaaacagttaggagggtgtattaataacataggtgaagtgtaatgaataaccaggctggaggaaaagcaataacgatggaatcaaccgggcaagaagtataacaattaggatcagtaaaatagaatttggattggaggaatgaaaaaaaaagggacaaaacaaagttgaactgctggtatccatactggaaaatacagatgtcattcaaataaataatgtaatgaatataagaaaccagttttaggagtgaagtggatgttggcttgaaaatatttcctttgaggtttcagtcaaatgaaaaggtcctgaaatgctacgtggtagcctaagaaggaagcgttcctagagagaaaaaaattagaaaagatttacatttgataatttaatcttttccttcatacaagctaaattgataagaaagtaaaacctatagttttcaccactcttttacaaatatccctaaccttttagatattcacatgaataattgagaaaaatctaacagatgacttgcttatgtcatttgtctgctttatccttaggttcctctggcttatatattgttcaataaaatacagatcattgatattgtacaatgtactgataatggggagtgaatccatgcttgtgcattcttttttttttttttttttgatttgcagagggcgtgcccagtcaacaagagaggcacaattgtttttatcatcacctcttctcatctaattccatgaaggagagtagtattaccatacaacagataatgagttggaaaacaagaaacctaacctcagaacttaaggcttggggaaaaataaaagagtaatttgtgtttaatgcctgtataacttggcaagagggacatataaggcttagtgatgcccaacatgtgcttagatgtggattgttagttgatgtcttgggggttctgtaatctaagctaaatgctcaaaatcaattaattgatgttagacacagagatctgctttgatccctctttatcgtatttctaggccttcccattctcaagagcctgagaaacgacagctttccttaataacttgttatttgtggtaggagatgaaactttgataaaaacacaattatttttaaatgtctctttttcactctaggctgttgtatgtatttcaaaaagttacttttgaccctttccagaatgagaaagcaatcaagaagattataatatcttgcttagttttctgctcaatttatcaacaaatatttcttaagcaattattaagctgagcagtgctcagcgctgtacttggtgatataggaaatggggaaaagactgtctttaaggcctttataatagtaattacctcaacttgtctgtttcttttccttaccatttcgccaaattcattgatctatcttgttctcaaagcaatcgccatagttatattgtaacacagcattttctagggtgtccccattaagttgagagtgttgacaagaaaatacaagcttatttatcattgtaaaacttgagacacctagtagttaccctaaattaaatatttgttggagtcagtcacactaaagagaacacttactgcattgaacaatttacctacattagacagcatttaaagactatgccacagcaaaggcccatggaattcttgtgaacacagaatagaagtgtattaaggaacaagcttaattctgttctcttaaagcacaacactttctcaaaacatattttgaaatcacctttgaccattttttttaactaataggtgggtgggagttagggtaggaaaacacaagcagcttcatcaaaacgatattctattttcttcaaatttgtggggaatcatacggcctctcaattttctacattatgctaattatgatattaatctctctgccagcaaatgaaaataatacatattagatgtagcaaatgtcaataatgacaaaattagtcatcatgcagatactcagggattcccaaaatatgtttggattatgattgctagctttgagtttgcccagaatcgtttcaataaaaataagggactcaaacacatttggagcaaaactcacatcataaattttagacatagctctgccaataatgctctcagttatattttcagtcctaatatttcctctgagttccagaccagtatcttcaactgtctgattgatactctctccttcatttctgtctccaatgcattaagtcctgtgtatttactttccaaatgccacttggttccatgcacttctctccatttctgccactgactcctcctcaatccaagcgaccatctttcctcactttaactaccatgatatctcctgcttggtctccttacttctattcccgggctcctccaatccattcatcctccagcagagaatgatgactagcaccttccacagtgtctggctaataggaggtatccaatcaataattgacttacagagtgaaaatataggcatggcaaataccagtagagaactacagggttttagaaccaatgacattagatacttccatcaaatatttacagtgtataatcaagttgacttgcacattgtcttatttttgaaaaacaattttgttggctttttctatatgcacacatacatattgtatcaccctctacccgccaaatggcttttgaagaagtatttatgtggctccaaattgataatacctctagagagaagagaaattagaaattttaaaatgacctatgcttcctttcgaatatcacgtcctgagacagtgttttttgagttacgtgcaatatgttccacgatgaaacatttaatgtgttcagaggcatgctagtaatcatgtagaaagaattttatgcctgaagtcacatgttctataaccaggatcacttaataagaaaacaagtacagctgtggacaagatgcctttttatcagggaaaggccaatttgttttctttgcaaatctaagtaaatggagagaaaaacacagcccttaaatgttttctatttgtcctgaagttctcatgaatgagttagaaggcgagaaggattaaataaatccttgaacgtagagagagctaacatttattttagcaaactaaaacctattcgctttgcaaagttctgttctgtactttgtaacaacagttttctttaaaacaagagccaccaattcaaatgcctttacagaatgattgaatgctttcatgccccacctaaaggcattcaaatcattaatcaaacaaagttctaacgccaaaacatgtctgggaccagatttaaaatgtagccctcagtttcagagggcaaaaacttaacatatttatattttcctcactttaggtaacactgtattgaatctctgcttgaaattgaggagcacgtgattttttctttttggcccagggcagcatttcttggaagagaaagaaaaacaacccaagatacccttacaaaacatgtagtacttaaagctctttatgatgaattaattttggtatacacattaatagcagtgataataacaaatctatatatatatatataattgatatgaataagataaatacatcaaaaggaaatttcattacaatttgatattaggtaaatgtcccattaaaataaattgctactgtacataattttccttcagttcattggcaggatgtttgctttggaaaataaacagtctatttctagttttagaaggaattctcattattcttttatagcaaccattatcaggagcagatgggaaattgtaccaagagcatatctactattatacctcacaggaaaaagagagtattaaatgaaatctaacaaggcctgctcctgactctagttcctgtaacaaatgaacacacacatttgtatggtttcagcatttgtattagtaaggtacaataaatgtttactgaaattgaaaaaaaaaaagataacaggagaaagaagaggctaaaaaggtgcattttatttctgatcgttcattgtaaagactgctcctttttaaaataatcaaattttattttatatacagagggtacatgtacaggcttgtcacaggggaatagcgcatgatgctgaggtttggggtacagatctcatcacccaaacagtgagcatagtacctacctgatgagtagtttttcaaccaatgcgcaccctccctccttcccacatctactagtccgcggtatctgttgttcgcatatttacgtccatatatgctctatgtttagctcccacttataagtgagaacatatagtgtttgtttttcctgttcctgcgttaatttgcttatgattatggcctccaactgcatccgtgcttccgcaaaggacatgatttcattctttttatgactatgtagtatttcatggtgtatatgtaccacattttctttatccaatctaccattgtttcacaactagatggattccatgtctttgctattgtgaatagcacaagacaggacctttttatttgactgagttccttgcaaattactaataaaagatctggaggtccttagttaaaagttgaatctgtagtgccgttcaaatttagagatgtattttctgttcaagagaagaaagccctcattcggtcatgcttaatattcagctgtaaagtccaaaacatatgagaatgacacaaatggaaacattttataaatacctatacaaaggaggggcacttagttcccctaggcctcttaaaagtcctctagaaagagggtacttttatgctaactattaaagatgagtaacgaatttgtcctatacaacttaacagtatcgtcaaggaagtagaaagttactcagttttactgggcattggagctaagcttgaaagtgaggaggagaagcggcaggagacggagccgagaaggcagtggggagaagaggaggatggtcctttccatgctccctgttgtactaacatgtttggatattatcttatacttcatatatggactggattcttgtccttctcattctgagctctccttgaccttgattcttacctcctataactttcattctttctttactcaaaaaaaggccatttatttcagccatttttcactgttttcttatccttcctagttgcttttctatactatttttccactcttttttttttctatactattttgcccttctctccattttcctaactgctagatttccccaattttagccatctttcaattgttctgactatcctcaggtgctcccacaaggttatcagaccttccaccaagacggaatccctcagtctatggacaggctaagttgaatgggtcctggtgctgtgcttagcatatgccttgagtatttgtgcatttattttgcttctttacaaaaatccatcatccgatagaagttgaaagaaacttgctgaagcacattaaaatctctgaaaacagtattggctatattttctaataattagcatgactggttaacttgctttatttatcattgaaaaaagtatcagaaactgtatatcaaactcctgaattcttggcactgacgaagagacacaatgagaatgaccttaggataaaaaaacaagataaagcaccatatttgtaggaaattgcaccataaaagtctgtttcacaactctcccaaatttcattttattacatcttttctcttgaccaatcagtaaactcggttaatgatttacctgtctcaaaataattcatgaacaaaattacaagtaaatctcagtattggattcttgaaacatctccttgttcaatgaagtttcctttttcttccctctatttccctgtatttatcttttcttccagttgcattttatctcttctgtttttttatcttgctccctagtttgtgattttttgccaattttttatttcctacataattcatccaatctgtcattgtacaatttcttataactgcttcttagcttattccttttcttcatttgtcacattctatttttcatctattgtgttttcatgcagttttggaaagttttacaaatagacttttaaaaaaatgtacgtaatgttttcatagaaaaggtagtggtttctttttcttatatccttccctgtataaaaataaaaatgtagcagttctttctttgcctatgtttcctctttccttcccccaatttgaccagacttgaaggacttagatatgtaacagtgttattttctataatttaggaacagcttttgacttaaaaagcagaagagaagttgaaaataatatagtaattctacatgtccttcctgcttcccaactctctgcacatgtttgtaacctcccctttcttttttagtgtatctctttcatatacctttgtccccagaaattctgattcagtagacttagaatggaattctgggcttttatattttgaaaagctccccacgggagttagatatgcacttcttattaagaatgaatgcttaatattggaatcaaaacacaataagctttctaactatgatgaataatccaacagatttaattatgattttctttttgtccagaaccaagactagatgttaattgccagagaaatagataagaatgcctatgacagcagtacattaatatgatatcaaagcttggaaattttattggtaatgaataattcagtacttaaaatatttagaagctatagaattaaaattaattaatgttgttcactgtgtgaataaagttgattgagattttacatttaattttgtaaacccagtgttatcttttccagctcagaaaacaccacatacaagctactactttctgttttgatcccttatttttctttcttatgctttatcactgaaaactctccttgagcaggccatgcactgtaaatatttctcctggttgcaaaaccttctcatacaaatgcagtagactgtgtaatgagctcttctttcacaaaattaaaaaaacctgaaagccctgatttgcgattctatacaaatgagatttagatctaacaattttaaattattgcttcactcttagctgttcaattctatctcttatttgggaaaccgaaataataaaaccattgctgattccacaattaggttgtaaaagtcaccgtagccatcagccatgaagcaaaagtgccaagatcaaaactacaaagcaaagaggctgagataaaaatgctgcagcattagtttatagcattataagcagcaataagaattccttgattgcttaacaaagactcaaaaggcatttactccattaccttacaactcaaagaggtattcctggaccagcagtattggcatttttttgaagtttgtaggaaatgcagaattttggtgcctccacggacctaatgcagcagaacttgcagtttagtaagatctccaggagatttgtatgcgcattaaagtctaggaagcaccgctatggtatacatctgatgtgtgcccatgcattttttaaaagtatgaagtaatagttgtaagtattggacactcttgaaggaacaaataagagccatggtctttactctctaaatacctccctgacatctatgttttaggcaaaatttttttcccatttcagtagtcactgatgcttgcacgatgcagtttattccaaaacaatggtgattctcatgtaatagttcatgttgccttaataatttacgttgcctcaagttctctgcccaggccccaatatacaccgagggctgtactcctcccctaacgcctgctctcatacagtggcatagagcccagttttatgctcttggtcacatcatggagattgcacaccacaggctttaacttctgccgtactctcactgcctctaaccctccatatgcctaagttctacgattctttaaattccaaattgacccagaagtctcctccgctcatccttttcactgagatcatccctcttctggcctaccatttgttgatcaccttgctttttttttatcctactgtatgtagtataacaaattatcacttgcaactgtgtcttattttttcaactagattatgtactgcctaagacctagaaaattgtgcttatttatttgaatctctaggaggatcagtaatgggtattaatactaatgactccatggtgatgatgagcctgaacttcctcccttcctttctttctacctctctcctttcctcccttcttttcttcctccattccttcctctcttcctccctccgcttcttccccacttcccttattcatagattcatgcgttcactcagcaaatgcttactgaaaccttccatgcatcagacattgtactaaacaataggaaactatcatgaataagacacaatatctgacctcaaagaatttatgatataaaagtaatggcataaaccgtgattacttttgcaccaacctaatatatagacacagtttgttatgactggtgtctctattactaagcaatgactgtcacatgcaacgctgatctgaacaggtggtaaagagtgagatgtaagcaatggagcaaagccaactagttacaaggaaatatcacatgtttactagagcacatctcatgggcattcaagagagtatggccaggacagcttgtgaatagttcagtaactgtgcatagttttatattcattgtgaggcaccgtgtcaccggtttgctgatttacagagtattttaattgctaactgtatgctaccaaaatttccagtattcgaaaataattttgcttgaatgtagaaaaagaaaaaagccaagaaatgtatgtgaaacgagagtctaagggagctttacctcagtctcagaaaacatgcattccttccttcatttaggaagcatgtactggggtctactgtcagcttgctattgtgtcaaggagtaggagaatacaaaaatattagagaatatgaatcacatctattaggagagttttctacatacgcacattattctgtcagtgacataaggatttgagtcattcagatttaaatacggtaggtacctcaagttctcagatattatttcattttctaaggttcgtatttagttaatatgttattttaatggccttacaaattctagattatcttttttaaaaagttaaatagaacgtaattgccatttttatttaatggtaaaaagcatttttgtttttgtgtgtacttggttgtaatattctccttttcaattgagctatttttctgatactttactcttaaaatttcattcaggaaaaaagtaaacaatatttaagcttgacaatcataaaaatgctctggtgactatagattattttaaaatttattactgtagcttagggatatcttgatgggatgctcctgaaagcaattaattctcagttttttgtggcttctaatgcaaaatacattgacgcagacagaatttgaaatgaattttcttctaatatagcaattaattttatttaaatatctctagagtttttttttaatactgtgactaacctatgtttgttctttttcacctctcgtatccacgatcactaagaaacccaaatactttgttcatgtttaaattttacaacatttcatagactattaaacatggaacatccttgtggggacaagaaatcgaatttgctcttgaaaaggtttccaactaattgatttgtaggacattataacatcctctagctgacaagcttacaaaaataaaaactggagctaaccgagagggtgcttttttccctgacacataaaaggtgtctttctgtcttgtatcctttggatatgggcatgtcagtttcatagggaaattttcacatggagcttttgtatttctttctttgccagtacaactgcatgtggtagcacactgtttaatcttttctcaaataaaaagacatggggcttcatttttgttttgcctttttggtatcttacaggaactccaggatggcattgggcagcggcaaactgttgtcagaacattgaatgcaactggggaagaaataattcagcaatcctcaaaaacagatgccagtattctacaggaaaaattgggaagcctgaatctgcggtggcaggaggtctgcaaacagctgtcagacagaaaaaagaggtagggcgacagatctaataggaatgaaaacattttagcagactttttaagctttctttagaagaatatttcatgagagattataagcagggtgaaaggcactaacattaaagaacctatcaaccattaatcaacagcagtaaagaaattttttatttctttttttcatatactaaaatatatacttgtggctagttagtggttttctgctattttaaacttgaagtttgctttaaaaatcacccatgattgcttaaaggtgaatatcttcaatatattttaacttcaacaagctgaatctcagttgtttttcaagaagattttagaaagcaattataaatgattgttttgtaggaaagacagatctttgcttagttttaaaaatagctatgaatatgactatgaagctaaaaaaagtgatagtgtcacttacctctagtttcaccacatttgtgaatacattcttgaaggggaacttgagccaaagaggtacaagtttaatggggaaaacaaaacctcaaaaaggttactgtcaaattcaatcatcatttaaatttcccttggaatgtattgaaggcacagaaagccaaatgcgtgctgctgcagttggaaagcctagagagtttataaatgggattttgtattatgcttccagttgttgatgttaatgtgtcttgtttcgtaaaggaagacttggcctttatttaccaaatgagactattgttatgaacaatgaaaacttcgttcttttgccaagctcttgcatcccacccatcatccacataataggtggattttaatattcaggaagctagaacaactcattgatgaatatctttcgttaagatgtattaaaaagaagattttggaattatgtcagttgtctttgcccacctcctctttccctctttattcatgttacattattcagaaagtagatacaattcatattttgtacaaaataaacacattagttgacctaaacacacacacacacacacacacacacacacacacacacacacacacacacacacacaccccttgccaaagttaaagaattatagcctcatcaaaagatattttgaataattaagtcttggttttgaaaatcttcttgattatagatagataaaataaagaactaaactttgtagttaaactacttccttaggtaagtcatatacttttttcccagattgaaattcttctcttaatcatacaagtattttattatttagataactgatgtgcttatactatgaacaggtataaacctgtataatgtcatttctgaactaggctcaatctaatccaaattaagatggtaagaaatgagaaaattaaaaaaattgaataccatactataaatatatatatacggagagaattcataaagtggattaaatcgactggaagattatttttctataatatataaagtattgtttcctattttaaatgtcttactcatatagtatttgaatagagtgtattaacattccctctgataactctaattcacctgaattttcaaaatcttgttatctgttattgggctctaaaggcacattataatttataaacaaagatgtagcaatatgcctgtttcaccaaataagctctaaaattttagatctttctaattttataagaaagtggtatatgctgactctgttgtgaaatagtatacaaattttaagttaattacagctagggatttggctgtaattaggaaaaaaattttcccatttaaacatgttgacctacattaaatattgcacttcagtgctttaaaaagtcaagttcagcttccttgagttttttttttaagctgagcttttaaagttgtctatttcacgctacattttaaaaataaatgttaacatatttaaatttccactgagaccacttttgtggcatacttcctcaggatttttatatcacttaaattttatgaaatgtaaaaatgtaataaaatataagtactggttctaccaatatactcatagctatttctaagcatccagtagcaaatcaagtaaaaattaataaaataatattttatgaataatatgttaacctaacaattaattatagaagggctgtaatcacgaacctattgctaatcaatagtgtactctcagtgcaacgcaagcagatgttagaagggaatagaagttatttattgcaccggtgaaaaatatataagatgcctattcaacttaacaacagtagtcttcgtttgtaatggactttaagtacagcggttagaaatatttaacattttttagtccagggacatcaatgaaagaaagtgtataaattcaagctagatgtctatatggagccctgtagttgcaaaactttaagtcttctgaaattttaagatattagaaataggaaaaaaaatctcaaaagttcaaataatagtggacatccaagaaggttagtctatgttggaagcaaatgaagtgtgaaatgtagtcagttagcgatgcagtttaagatagacaattcactacagcttcaattatgtaacagaagaactggatacatctataggcttaagcatgataataatgagtttaatgatggcgtagccaccaaaactgtctttgtacacgaaggaggtgcaaataaaaacctatcatcggctgtaaggggaagtcataggttgatacaaagcaagcctgtgtacaagtctttaagcaagcgtccatgaatagcaaggggcgccatgctcttcactggagaagaaaattacctatttgtctttactaacctctaactgaaattaagcattccttttcattttgaaagtaggcaaaaaaatcacagtagtacaatcagtacctatgaagtcacagatatgtacacatctcattacagttataataaatatatcaaaatatcatttatgcttatcactacttcaaaactgcagtacttattatatgtgctacagggtcttattgttgggctttaaaacattattctgaggaatgtcaggcttcaacagattgccaaagaagtccaaggcataaaaaaatgatcctagccagctgtctgtttatctgcccagaatctcatcctaatttactatggtttcagtcattttaatgtgcagtcactatcttcatacactccttttcttctggagtattctaggagaagacataccagtcgaggggttctggggagccaggccttcaagcaatggattgctgacaacataatgaagaggattttacttagaataatgtcagttgataaaagtttgaatgggagacggaagcaaggcagtgggaagtggaattcctaaattgaggaacctctgaatcataatccttagcaataataattaagatttcaaaacattataattctttcttcttttagacaagtctgatattgcttatcccatatcacagataaggcaattattctactaatatgcattaaggaatagtggttttaatttaagtgttaccttaatgaaaataattttgaattttttccttccccaagtctttttgtgaaaaatttcaaacatatagaaaaattgaaacaattgcaaaacatatgcccatttacactgttttcctccccctaaattcttagagtcaacaattgttaacattttgccatatatgctttttttctctcgctttctctaccctctttctgtatctctcatatatagggcatcacacacacacacacacacacacacacacactttttaacatttttgcaaataagttataaataccattatattttacccctaaataattcagcatgtgtcgctttgaaatacagacatgccatatataaccatgcctgtttattatgctctcctccaaattaaatataatactgcattattgttaatatccattccatattcatatttccttaatagttcaaaaatgtcttttatattttgcaggggagttagtaccaatatcttatcatggctcatgcattacatttggttattattatttttcatccttcttagtctaaaatagcccttccacatttttttcaccgatattgaaatttgaaaatgtccaggacgctagcctcaaaaaatgtctcatctttcaggatttgttttattttttttcccctgatgggatgatttaacttgttctgtagtctctgaatttctagtaaactggaagttaggtctaaataagacttcaagagatgcatgtcaaacatgtttggcgagaatacttcatatgagatgctgtgtattttgtattacgtcacatcaggaggtgcatcatatgaagtagtctcactaaatgctgcaaagttttattacttgcttcaggtggtgactgacagatcttgcattataatgtcacattttttcttcgcaattaataaatcatctaatggctttagtatccattgatgatccttccctaactcagttattacactggggcttgcaaaatggaggttttcctaatctgacatgatcttaacatttaccagctggctttcttctgtttgaaaaaaaaaaaaaaaaaaggtttttcctctatatttatgtcaaaatggactcataaatttttatttattcaatatattattatgaattacagttattattcttgcccagagcttcctgctcaattgtcccaggctcaccttggactttgcctatcccagatttagaattacccatttttttcaaggaactctggttacttttagaggtgaatagtacgtagaaacgtacatctgggtagtagccccttctcaatggaatgtgtgcacctttctggcaagcagtcccaaaggagataatattttcagattaccttggaaatgattcttgacaaatctctttcagaatacatggaagttaaaagtaagtctagacatgttaaaaagcccttcttgtgtgagacttcatgtacggtcattaagttactactcctttaaacctctctacttctgaattcttaaaccaaaatgtactagtatataatctatgctggtttgccatgcaaattaatggtgtaaataagataatgggaggcattcgtaaatgtacttaaaggaagaaattattgtttaaagaccttagctcattgtttgcatgcaaatacacgctgttgattagaaatgagccttatctaattcattaaagtaggcctggttggtcctcttcttgaaagtctccattagcaattcatattgctctatgcgcttccttgtaagacaactgttgtctcttaagttttctttaactttggcttcttacaaattcagaccccacccccaaccaaatagctttcaaccaaatagcttttcagcatcttatttcctacaaattaaaagcgaatattttaatgactcaaatggctctttacagtgtgtgcaatatgttaaatgtacccagtatatccgtgtgaaccagtgctacaagcctgctcacacattcacattttgcccccaggatctgtcccgtccgcttgctctgtactcaaacttcctttttttctcattgccagtttagaccttgactctccatccagcccagagtttggaaactgagtacccacaggctgaatcctgaatgcatgcagtatttttgcatagccactgtttttaaataattgacaacttttaaaaattgagagacctcattttttaaaaaaatatggatttctgtcttcttttgaaaatttagatctggctactaggcactcattactatattttctcttggcaccatcacctacaactgagtaacagatgtttcattttcttgctactcaaagtgtggtctctggtccagagcacagacatcacctgggagttgctaagaaatgcagaatctaataaataacagtcagcatttttaataagatttccaagtttccaagtgattcatgggcacattaaagtttgagaagcattgcctggggtaagcaagctttgtcctcagtttgcagcacctgtcccactttgctcatttatattaattgcttttccatagatatttgattttatagtacctcatgcagacctttgtatgatgatgacggttagggtggtgatggaagtgatggtgataacacttaatattgccatgcactgttccaagtgttttacgtagctcaatacttataacaactctatgaaatagttgctattctccttttaattttacaggagggcaacgaaggcacagactgataaaactctttgcccaagattgcacagccagcaagtatttgaaccaggatgcagtcccgcagtctgcctccggagtccttactctagatcagattttgcattatttatcccagttttgtccatcaggattctctggtatacacttgcaatttcttcctaccaaccttctccttacctttgatggccacacgtagtagcaaaagaattgaacatagaatctgttctgacctatctttccaaccctgtttttcataatttccactatttctgtttatgtctgaagctttgaatgacctgaagttttctgttcttcagcttttgcaaaaaaaaaaaaacaaagaacaaaaaacaagacaaaaaaaaaaaaaaaccgcttcctttggttgaattctctttccccttattttttttcccaaaatcttacacatcccttaagactcatcttaactgctattacctcaatgaattgtgacctgctcttctcaaacataagcagtttattctcttaaggttttcttgcccctttttataacactcatgtaatattgtatgtatatatcatgtatcatacctatttacatatgcttttcccccagcaagattaaaagcttcatgagggcagaggactctcttattgttatctctataacccacagtacttaccagaaagcctgatatattgtagatggccagtaagtactttcttaatttaaatcgtaagaattttattcacattcagattaaactgaagatttaaatctttacacttgacattattatatagattaaaaatagatctaaagagccagaccaatttttctgtttttatcatgttatcacatttccatggatacgtttgcaattctagaaattgaccttgatcccttctagtcttaaaaaaatggaaggagtttggttaataatattttaggtattcttcagaatttagtacatttaagagacaagtaacttcaatttatttagctagttatggcaaaaagcagctctttgattcaaacattttgtacatttgtttatcctactctcactgtatctcaactaataccttttaagtgaattaagcaggaattagccctgaaactgaatgttttagcctcatcctacatatagccacaagatgttttagatgcaatccatatcaccaaagagctatttttagattgatcagagagaatcatacagatattattattcacaggtgtcaatggaaaagctggtctcttcccatctgttctctgatgactcttgaaaagctttcaagggcattcataattcttcatcaaaagactatgaaaaatcagcttcatagttaattgttttatgtcatattttattttttcaacttggctagttctagtgaaacagactagctggcaccaaatatgttgttgcattggctggtaatgatgataccactgtgtggagatatacaagtgaatgtactttatttgtggccttccatgaactttatgtgcctgggaaagtaggagttagggagagtttgttagggaacgtgatctctgggatgggtcttaaaggatgagaagaggcaaatgaagagtaaatggacatgccagagagaaaaagtgacaggagcaaaatcactgaagcaagaaaaaatggcctacattgaaggactatacacagttcagtataaaaaggctctgttaagcaagcaccattgacttaccctaaactcttcattttctacatataaactgcccaattcccactccaaacctattgatggatattagtaacctattgatgtttttgaaaggtgttcaagtatcctttctggtaccatgtaccttggctcccaccatttgagagtatgttctccaagaggcaacagtctgtggttcctgacctggctatgcaagttattcttattattaaaattgtcctatttaattaaatatcatgaaaactaatgaaatagaaatgaaaagataagagaattgtggtttctatgaatactaaattgaatgctttggaagacttgataaaggtgattagaaaaaaaaaaaaggccagatgcggtggctcacacctataatcccagcactttgggaggccgagatgggtggatcacctgaggtcaggatttcgagaccagcctggccaacatggcgaaaccacatcgctactaagaaaatacaaaacttagccagacgtgggcctgtagtcccagctacatgggagtctgaggtgggagagttgctcgaacccgggaggcggaggttgcagtgagacaagatcatgccattgcactccagcctgggtgacagagtgaggaaaaaaaaaaaaaaaaaaaaaaccacggtgctgttgaattagatgtaggtaagacaactgtttaagattgggtatgagggatagaatccccaaaaaatggaggtattttgcattgagattattttcagcatctccaaatctgactgtaattcaaagaaaccaaactaaaagtcacagattatgaaatgtagaagtgttttatgcaaaaagtaatatgcttaacttcaacctgtgggcttttactccaggaaaagtctcggaccccataccaaatgagaagtaaatgagtgaccacttgtatattctaagaaaaataaaatgtttgaagatgtgtaaacacatttatataatccctccaattttacaatatttttccaaaaaccgcctatccacttaccctaatcaagtttgataaggggacttccttttatatgtaggaaggctgaaaaatgacgccatgacaaatgaaattgtcaagatggaccaggtcatggaagatttgaaatctcaaagaattttttccagggtagaatataaggatgttgggacgtttttatatgctttagatttgcatcctcatatgtccctttgacagttgagctcagagtgaaaaaaagagagtgaaactagtggcagggtgactcaagttagagacaatgagtaagcagaatagaactttaaaaacctgacagattcaagaaatacttgatgaaagtggaacaatttagtcgttaagtagatgggatgatgaggggaatgaagggacaattctaggatgatcccttttccaggttttttgcttgggggaactggctgcatggaaggctgttagtcaggataggaaatacaaaggagagtaactgaatggaaagaggaaagcaaatcagacatacagagctcaacttgggatataatagtcttaaggagctcttggaacattgaaaataaggtgatcagaaaacacgcatttgaataggtaagtctgaacatcaggaggaagacaagggctgaagacactgagccattttgctgtcaatgtagagatggtggcaatctccattgaactaactgcttctcaataaggtacctttctcaagtcattaatttgctaaccagtaaacaaaccagaattcccagagtacacattaaccattaagcactgctgtggaaaaggagttcaggtgtcaggaagccaacgtggcagatgagcactagtggtgacaaatgaaccaaagtgatatgggtgatctttatggggccacagagtaccactgtaaactatcacaaatcagaagggttgacaaacaaaatattggggataaatcagggaaaacctaccacaacatacaggaaaataagttcaaagatttcatcctacagattgcagataagaaatgagccctttttatttggggcaccctagggaaagagtagatgcccatatgtatatttaaagtatgaatacagcatttatttgaatatactgcaaatggtcaatacaagggtagctacagagcccataacatgaaaaggaaacacaaagaaatacatgccccagtcagactccttacttgggttgctgtaaattctctctccctttaaggttattgcatttaaagtctatctgttgattggacccaacagcagctgcaccaagactgtaccatttttaaaaaaaaaaaaaaaaaaaaaaaacaggccaaatggcattctgcatttattttccttgttgctgaagaaacttgaattgtctaccctcaaagcctgtcctttgagacacattttataattagaaacacttatttacaaagttctttttatgttagaatcacaaatcataacactccaaaaaaggaatacactatcctcaggtgagtgtcctacctttgtttacaaaagaaaacccaaagtcctaagagaaaaatgtgttgatcattttattgattccttaccttggtttaatatagttaatggatgtcttagatatgtataataagtctattatcatgttccctttaaaattctcttttgttttactaattatatgttgtcatagtttgaccattaatataagtctaaatttattataatgtgattttttctacaaaggttaatttgaattaaaatattttattttatctctctctactatgataaatgtttttaaaaatcgtttgtaaaatgaaagtactatatttgtgtaagctgccaatctaacaatttatcatttaccattatgatggtgaatgtataacaatccttatattcagcagaaagccttatctctcatttcagaggaatcttgccccggttaattattctgtctcttgaatgcacacaaacacaagcatatctttaccctttttctgctgcctcactatccctgatcaggtgaatgtttttagctcctagattacaatataaatatattcagacattcctttccaaatgcattcattccactgtacttgtcagagttcatagctgtgaataacagaacccagtttttgttgatagaagcggaaacggactttaggagaaagatacagacctgttcccattcctaaacaaagggatagaaaaccagctcaaaatgggcagaactcaaaaaagaggctcagctccaagaactatagtccaaatcataccctagattggatctcgaactcttggactcaagcgatccactcatcttagcctcccacagtgctgggattacaggcatgtgccacgacgtctggcccccatacactagatgtaaacgttgccatgcaccactctaccactgcagacactgggtgaagaatgtcattgctactggaaagaattctagatagtgccttataattctgtcactcattccagattcaaaaactgaacttcccccatcagattccatttgtatttggggattttgttcgacataatcagggcattcagattctgggcaaccaaagttaacaaatgtctcttacttcccctttcttgttattattcccatttgaatcttcttcatagttagtcactgttacttaaacacacattctctattatcacatttccctctcctctcttttgctgtttgcttttgatccaaaccactgctcagaaaccattattgccaataacaacaatgatttcttgtagttaaatccactggacatatcttagtcctattatccgtaggccatgtgccattaactgaacactttccgtattagcacttggtcctatcttatcttccaagtcactaatcttatctgaatttattcttacctctctatgtaattccttactatattgatgacactccttgctttacctgccccttacatcctgatgtttctctaggacatgttctgaaccctcccttcttctcattctatacggtttccctgattgttatccatagcaacaaatgtagctttcactgtatcaattagaataatatctagggagattaaaaaagaattatagtaactgaaacaaagtagaaatatattcatcttcttgtagaaggaatctgccagtaggtagtccgaggttggtatcattgctctatgatgttgaagatccagatcccttctgtctcacagatctgccatcctttggtgaggtccttacactcatggatcaagatgactatcagctctctatctatcacaactgcttttcaaaggctgcaaggtgtaggaagtggacaaaaaagggatacctctacccttttaaagggacttcatggaagatctacacaacactttagcttgtatgtcattggccagaatttattctcatgacaatgccaaactgcaatgggcattcaaaatgtagtggaatggatcatgggctaagcagctaagcagtctctaccaaagtcaccgatttcattttatggcctaagtctaatatttggcccaatatatagtttcagattagacctacatatgtagcttcaaatggaccatttcctcttctatgtctcaaagccatctcaaagtcagtatatccaaaactcaacatgttatattcctctcccaaaatctactgtgggtgatatcactatctattcatgtacccaaactataaatttggaagttacaagagctagtattaatgacactaagttttgtgcatttactctatgaacaggactttgataagagttttacaaatgtttcccacttaattgtcgcaatatctcagttatagagattttatacgtccatcatctcacctgactcttcgagatcataagcaaagcatggcagcattcttatgtccattttacaaattaccacattaagcacaagaaaaaacaagatatatgtccaaggctaaccaaagttatagaaggatcgagaactaaaagtcagtgatttagacccagatctgtgccttttcccttattgttacatatgaccatatctagctatgtgaacaaagcagctaatagtgacgacagggtagaacaaataagaaagtgaatattccccactacatttatgattatttgccagtttaacagcttcaagcctgtgtcttctcagatatgtgcttcctcttatgtctaaggaaaagtactatatttgatatgcttttatgaactttcttttttgagatggggttctggctctgtcactcaggctggaatgcagtggcatgatcacagttcactgcagccttgatctcccaggttcaagcgatcctccaacctcagcctcctgagtagctgggaccacagacacgggctactacacccagctatttcttttttttttttttttttttggtagaggcaggatttcactgtgttgcccacctggtctcaaactcctgaggtcaagtgatccacccacctcagcctcccaaagtgcggggattacaggcatgagccaatgtgattggcctgaattttttaaatttaattttattgaggtaaaatatacctctatataaataaaagtaaatatacctttaccatttttaagtatacagttcagtggtaataagtaaatttatgttatttttcccctttgtcccctctccctactcctatttctgatctctggtaaccaccaaggtagtgtctactttcatgagatccatgtttttagctcccacatgtgagtgacaacacataatatttgtctttctgtgcctggtttaccttacttaaaataattacctccagttctatccacgttgctgcaaatgacaggatttcaccctttgtatggctgaataatatcccatggtgcatatatatatatcacattttctttatccattcatcctataaattttaaatggtgtggaatttggagaatacttaaggaaaaatgacgattgtgtaaaaggaaagtatctacaaaagcaaggtttatctaccccataaagataacaagagaatctgtgaatgtggatacggtttctggagtgtttcagaggttgaaagattgtgaagaactggatgggtataaaaaaaagtgaggaggagaagaaatgaaagttctggaatgttctgtaaattgtagatgagttccctatattaattttaaaatgtaaattgagattataattattttttgatgatctatttttgctgggctgattctctgttggtgtaactctttaacgaatatgggtcacgtgggaccctggattttattagaattacatgtgcgaatcaaattctaactttatgagccaatataatgattgtttttttaatgattagagtctatccatgacaaaaacagcttgtttctcctactgacttatttggtgttttcttgctaattagcctttatactaggcagtagtaaatcagagtacttggacttcaggttggccattacataaacctggcaactaaatgctgggtaataatcacctatcttcccacctgtgtttattacctttggaagtatgtaacatggtatctttgcgtttatatttttaatttgttcttttttctcttgcaccagctacttaaattatctgagcttccttttactaatccaaaaataaagataatagtacatatttatagagatgttgtaagagtaagaggtaatgtaaataaattggctagctctatgcccagcacatgagtaggtgcttagaagttagtgtctgggtacatgacttctggggatgataaagtgagtagctcgataaatctccccaagaatcagtaaaatgggacacactggagaaaacatcttatgaccctggatatcaaccaacggcatatgctaaattaaaaagtgattatttataaaaagtactaaactttgtatatgaacaatatgaatttgtggtgtatttgcctgtattgcccccagtccccactcccagcttggtcaagcataatagttctatcaaggtagaacaagccatggaaataagcagcttcatcaccacagggactgattttatttgaagcagaagtttaaaactccatgtccagaagcattgtcagtaacggtggagacctaggcggcaaacaaaaaggcagaatagcaactcagctggcctaaagttgcagtcttgattggaacaagtaactgactggcagactggccagaaatttaatttaaccagcatatctgcaaaatgaggcagccgtaataggcctcagtaaggactccttgtgtctccttcatgaaaacttaaaatgtgcctgcatgttgaatataccctttaacacatataaagaacctttagcaaaacttggaagtcttactggcttgaggtatttaagatcaactgctggccaactattgactaatgcaaattaagctatgcttacctctaggaaactaggcatacagtttgtttctgttgtttgacagagaaagaatatcaacagccacacactgtggggaaacagattccacagatttcatctaggcaagttattaaaacttcaatttaaaaaacgctgggcataagaaggaacatcagaatttggggctcctttaatatgttatttaaaatgtcaaattttcaagaaaaatttacgatacgttcaactgtgacccattctcatggggaaaagcagtcaacaaaagttgtctctgaattggcccaggtattggcagatagagacttaaaggctcctactataaataccttcaaacaactgaagaaaagcatgtttaaataattaaatgaaagtatggtaacaataactacaaatagagaatctcaactaaaagatacacactatataaaagaaccaaatgaaaattctagaattggaaagtagaataaccaaaatttaaaaaaatcactaatggggctcaagagcagatagtaagacagaaaaaaaaaaaaatcagtaaatttgaaaatagataaataaaaattatccaatctgaatgtcagaggtaaaacagtataaaaaacgaacatgagtcatagctttgtgtcaaaacattgagcatatcaatgtagatgttacaagagttccagaaaaaaagagaatgttgttaaagaggcagaaaaattatttgaagaaataatggccaaacacttcacaaatacggttaagctcaacaaaccccaaatagaataaacacgaagagatcaataccctaaaacataagagtcaaactattgaaatagtttcatttgaaattattgaaagacaaatgggaaagtctttaaaacaaccagaaaaaaatgactcctcatgtacagggatcacatgattgatagttaatttctcatcataaacaatagaggccagaggtattgaaatgacatattcagagttctcagagaacacaaaattgccaaccaagaattccgcataaaacaaaactatccttcaaaaatataggtaaaataaatatattaccaagttgagaatgagaatatttcttgctagctgacctgacttacaagaaaaaactaaataaagtcattcaggctgaaaagaagtgatattcagtaactcgaacccaaatgaagagataaagaatcacagaactgataaatatgtagatacatataaaagactgtacaaatatagatatatgtttttcttcttttaacttctttaaaagacctaagattgcataaaaattataacattgtgttattgtgtttataagcaggaggagcaaaaatggagcttagcagagaaaaatatctaaattttactgtgttaaattagtttgaacttaagtaaattatgatcaattaagatgcatatgtaatctttagagcaagcactaagaaaataaatagttaaaaacaaaatttaaaattacacactaaaaataactaacaagacagtgcagtaaaggagaaacaggaacaaaaaagacatgaataagatgtgaaaaaatacaatatggcacatgtaattgcaactaaaagttgagaattcccattaaaaaaatctgaaatttgaaatgctctaaaatgtgaaactttctgaaggttgatataataccacaagtggaaaatttcacacctgacctgtaatgagtcacagtcaaaacacagccaaaactttgtttcatgcaaaaaattatttaagatactttataaaattacctccaggttatatgtataagatatctattaagatatatatatatacatatatatatatatacatatatatatatatacacatatatatatatatatatgtatatatatagtatgtgtgtttaaacttaggtcctatctccaagatattaggtatatgcaaatattacaaaatctaaagaaatccaaaatccaaaacacttccaatcccaagcattttggatatgggatactcaacctacatatcaatagttatagtaaatgggagtgaactaagcattccaattataggcagagatttcagacaggattatttaaaatatccaaccatagtttgtttaaaagagaaatgtattagagccaaaaccatataatttcaaagaaaaaagaggtactatgcaaattgtttacatataaaaaatgaagtgacaatactaatgtcagacaaaatagactttatgacaaaatatgtaacaagagaaaaagacatttttaattatataaggggtcaattaagcagaaaatataacaattataaacgtatataattaataggaaagtcccaaattctatgatgcagaaattgacagaattcaaaggagaactagacaattcaacaattattattggagacttcaaaccctactctcaatagctggcaggccaattagacagaaaaatagcaacaatatagaagaattcaccaacactatcaaccagcttgacctaactaacatttataggagacgccaccaaatgaaagcagaatacatattattttaaagtgcacatgaaattttctctgggatagattctatgctaggtcaaaaaacaaatctcaatacactcaacaggcttgaattcataaaaattatgttctcttaatatgtcagaattaaattggaattcaacagaaggaaatttggaagatatcaaaatattttgaaattcaacaacttctaaatccattggttaaaaactaaatcacataggaaattataaaatattttgaactgaataaaaataaaagcacaacatgtcaagatttataggatgtaactaaagcagtgcttacagggaaacttctagttttaaatacctattttagaaaagaataaaattcttaaatcattaactcaagctttcgccataagaaactagaaaaagaagaacacagtaagctcgaaggaagcataaggaaggaaataacgggggttagagcagaagtcaataaaatagaagaagaagaaagaaaaatcaatgaaaccatacattaatctttgaaaatattttttacatggagaagctttagctagactgaccaaaaaaaaaagaattaccaaaatcataaaggaaaaaggggtaattactaccaaccctacagaaattagaaagactagaatgtaataacatgaacaacattgtcaacaatttctgcaaaacatattaaatgaaaaaattcttagaaagacataaattaacaaaactgattcaagaaaaaaatagacatatgaatagacctaacacaaacacagaaactgaattagtaatttaaaattttccaacaaaaaaacccaggtccaggagaaagataggaatccgaggcatccacagtatagaagaagaaatgaaactctctttattcacagacaatacaatcctgtatgtagaaaaatctgatatccacaaaataactgctagatctgataagttcatgaagcttgcaagataatcaatatacaagaataaattacattcctgtgtactagcaataaaaaattgaaaatgatactaagaaaataatttcattctttgtagcataaaatagattaaatggtcataaatttgaaaatataagtactaaacctgtactctgaaaactgtaatacattgctgagagaaattaaaaatctaaataaatgggaccatattccatgttcatgaattggaagactcaatactgataaggtagtgattctccccaacttgttctatagatttaatgcaatctccatcgacatcttagcagatgttggcacaaattgaaaaattgcacaatcttggcacaaattgaaaaattgatcccacaatttatatatagcaattcaaatgtaccaaatagccaaaacaattgtgaaaaagaagaaaaaagttagaggactttgaaatcaggacattacctgatttcaaatcttgatgtaaatctgcaatgatgaagacagtgtggtactgtcataaggacaggcttatagatcacctgtaggtttaggaaacaaacctattcatatttttttcttaaatctactaactgcactcctaatgttgacaatggaagagactcgatagtccagcaataaactcttatatttatggtcaatcaatatatgacaaaggtgacaagataatccaatagaagaaaagcttattattgggtagcttattgttagtgtacagaaacagagctgattgttaatacaactcaacaggaaaaaggcaaataacttgatttttaaaatatttaaatatatatttctccaaagaagacatagaaatggccaacaggtatgtgaaaaggtgctcagcatcactagtcatcagggaaatgcaaatcaaaacctctgtgagatgaacactatcatctcacccctgttaggatggctactataaaaacaaaccaaaaacaagagataagaaatgttgttgaggatgtgaggaaatcggaacgctagtacaccataggtggtaatggaaaaatgatgcagctgctatagaacacagtagaaaggttcttgaaaaagttaaaaatagaactaccatatgatccagcaacctcactcctgggtatatatcccaaagaattaaaaccagaatctcaaaaagatatctgcactctcatcttctctgaagcattattcacagtagccaagatatcaatacagcatagctgtgcatggaagaatgcatggataaagaaaatgtggtgtattcatacagggaatattatttggccttaaaagggaaggacgtcctgccatatttgacaatatgtatgaacctggaaggcattatgctaagtgaaataagccagtcaccaaagggcaaatactgaatgattccatttatatgaggtgtctgagacagtcaaactcgtagaaccagagagtagaatgatagtaaccaggggctgggcgaagggggaactgggagttgctgttcaatgagtataaagtttcagttatataatgtaaataagttctaaagatctgctgtacaacatagtgcctgtactgtgcacttaaattattattaagaggatatgtcttaagtgttcctaccataagaagaagaagaagaaggagaaggagaaagtgaagaagaagaaagaaaaaatgaagggggcatgagcaaacttttggagttgatgcatatacttggttaccttgattatggggatggtttcatggttgtatgcttatatcccaattcatcacattgtatacagatgctcctcaccttaggatgggattgtgtcctgataaacccatcataaattgaaaatgttatgagtcaaaagtacattttcaattaatgatattttcaacttacagtgagtatatccagatataaccccatcctcagtccaggattatactaaatgtgtatcgcttttgcaccatggtgaacttcaaaattgtaagtcaaaccatcgtagtcagtcggggaagatctgtttgttaattatggacccatcgtgtacaccttaaatacttaataaagctgttaaatgaaaattaaaagttgactgggcacatggctcatgcctgtcatctcagtgctttgggaggccaaggcaagaggattgcttgaggccaggagttcaagaccagcttgggcacatagcaacattccatctctacataaaattaaaaatgtagccgactgtggtgatgcaagcctgtagtcctagatgctcgggaggctgagttgggagaatttcttgagcccaggagttggaggttacagtgagctataatcatgctaccacaccccaggagaccctgtctcaaaataaataaatagaagctttaaaaaatattggtatctcagtgttcctcattatccactgtatttaaggtttagctacttgtgcttgatgcttgacaaggtaatcttacttttctccctgatattggtatgatgcaaatttactatatatatgacacaaatttatatatgcaatattttctcgttaatggccttttattttactctcattttcattatgctttgccttttaagtcatatagcaaataaattatgtggcattttcttagcaactattaattcaggagaatgggaacagaattctctcatagattcagctggaaggtaatgatggtcagctcccagtggagaaaaaaaaaaaaactcccttcagttttcgtaaacatacagagaaattttctcctaagtgctatgtcagtctgctgtatgtcctattgatctgagaaccagaaaacacatattttagtttacactgccttgactctattgtacatggctaggtctgtttaaaaaagaaatccttgaagataccctttggattctagtattttaaaacggatgcttagctaagtgaagtggtctacttcaaggatcaaaaccaatcttgagtaatctgttaggtagactccctaagttcatctgtaccttgtaccaaatttttaatgaatttagtaattgacatggatgtaaaataaataatacactaataaagttcatgcagaatcaaattttaatgcccagaggtaatgtagaagatattacctgtccatttctctggacttagctcctgcaactctccatttttctctctaaactttagccacactgaattcctagtttcaattcctctgactcgctaagtatttcttctaccttgataaaagctaattcctttgtcttgtaccatctgtattccggctgatattgacatagttttcagggctcaatttcaatgttacttactcagagggactcactgttacaaccaccacagccttttcaatctaagtaagatccactgctcttcttagaaacaggttatattccaaatgactgtaagtgcttttgttcttagaacatatgtctccattcaaaagaccgatagatattcagttaagccctttgagaaaattataaatgttgaggaccttgattattattgttattattgcttcttttctatgttttcccaggactctcaacaaatttgctttgcttttgtactcatggcacataatgagattaataatgtttagaaaacatttcaaaaatacacacagaggagacacatcttagtctaaagttagacatgataccaaaaactataataactatagctgaccagtgaccccatttattcatggaaagtaaaatttgatgcatatttgcctttaggagcaacatacctatgaaagttctgaaagtgaaagtttgtaaaaaaggagtactctcctaacaatcttaatttttttctatatatatgtatggtttgcattaaactcttttgtatgattagtggtttaatgttgatgtcacccatgacaccataagctacgtgtatggactggctctgttttgttcactcctgaatatccagcaaaaatagtatagtgcctggcccttggtagatgtgtaataaatgtttggtgaatgcatagctacacttcaatgcttatcgcattttaatcccagctactcggaggctgaggcaggagaatcgtttgaacccaggaggtggaggttgctgtgagccaagatcgcgccactgcaccccagcctgggtgacagagcgagactccatctcaaaaaataaaaacaataaaaaaaaggagacccattcatgtatctgtatcactgactagcctgtcaacattttgttaactacctcatcaagtagcaaaatcagtacctggtatgtggtagatgctcaaatatttgttgataaaatacagtaagttaatgacaggcgagcttgcctcagtgaaatataatctgtaagtgagcagtgtgtatatcatttgaaggtgccctacttagcctagcatatcacagagattcccagtaaatatttaggcagttcattaactctaaaagttgaccctcatagtcattggcctacattattcacctccctctgtctctaataaattcattggcaaatttctgaactccaactggaatgtttgtggtggatttcttcatacctaatggattatttcaattttcattttacattgtattatttacttgtctgaggtctttataatgacaaactcggcatgcatgataagctgtcattacttatgccagttgacaaggacatattatttttctacaaaaaaaattatcttggccaggcgcggtgcctcacgcctgtaatcccagcactctgggaggccgaggcgggcggatcacgaggtcaagagatcgagaccatcctggtgaacatggtgaaaccctgtctctgttaaaaatacaaaaaaaaaaaaaaaaaagcagaacaaaacaaaacaaacaaacaggagtggtggcgggcgcctgtagtcccagctactcgggaggctgaagcagaagaattgctcgaacccgggaggcagaggttgcagtgagccgagatcgcaccactgcactccagccgggcgacagagtgagactccgtctcaaaaaaaaaaaaaaaagtggtaattgttcaaaatatttacttattaattcattttaaaattgcatgttgaaataaaaaataaatgtttagtttttaaactatctcttctacaacagaaacaatatagtgagaagagtgatcttgttttacatttttgcaaatctctttaaaagttagcttaagagaaggcagctggttcttatatctgtttctgcattgaatgtgctgtcatatctcgcatcatgtagcctctgaaaaactcataatagaatgagagaggaaaaagtcaaataacatcttagtattattacgaaaataatttggacctcacagaaccactgcatgggtctcagggactcccaggggtccccagaccacatttaaggaaatactgtttcagggaatataactatttttgtacctcctgtggctatattcttttaaagaatagtaacctctgtttctgaggaacttagctgcaattatgtgcagagtttaaataagtgaaacggaaataccctttgcctttctgctcgagtatgaaagtgatgatcaaaatgttcccttttctctctctctctctctctctctctctctctctctctctctctctctctcactctctggggaacttcgggtttccgtctctatataatgtattcatattccactggaaacatacatagtttgagaaaacagatgacattttttctgggggtggaaagaattactaccacgaggaattcaaaatacagacacagtaataaaaatcaccataaagcccagaggggaaaaaaattgagtaacaaaataggaggtgaaattataaaactgagtaacaaaaaagaggtgaaattataaaataaatgataaagttggttgtgggttaggaagaaagagaaatataaagaaactggcataatgtaaaagccaagacaagaaaagtgaggcagaggcataggtcttttgactattttccatgtttgattctaaggtaagtagatatagtttctcatagttggaaatgttcgtgaatttaaacagaattaatgtttataatcagatgcaatgtctagtttttctatttgtcctgtgaaataataattgtgtaaagtgctcatgattgtttcaaggggtgaggagtagttctaattatcatagatattttcatgacttcgcataccactggtttatagagattatacagattttcttatatcagaactctcgtatctttaattccctagtagatgtctaagaaggagatttatcacatagcagatggtggtaaacttgagtaaagtgccagatactaaatgcctttggctttgtgggccattcaatctttgctgcaactactcaactctgctattgtagcatgaaagtaaccatagacaatatgtaaatgaatgagtgtagctctgttccagtaaaactttatttacaaaaacaggtggtgagcacaacttggttcatgagccatagtttacaaacacttgctgtatagctttccctggttgaatttcgttaattttatacagaacctgcctcccatacacacacactttgttcttcatggaaaatctccccagactactatgaaataatgttattacttggagatatacaattaagatgatgtcattaggagattattaatataggaactaagcaaatactatatgctaagtactgaggatagggtgcgatcacaatagatagaaaatctgcaatagtttgatgaacatgggaaattacagtatttcctgtgatggaaacattatgaggggctgtgggactacataacaggacctgtgacctatacctgggttggggatgtctaattaatcaaggaaagctttgtagaggaagtgatgtctaacctgagattggaaaggtcaacctggagctacctagatgaagatgtatggaaggacatcccaggcagagggaacattgtatgatgaatcctgatatggatatagtgctggattttaaggaagagtaagttgttccatgaactatacagtgcaaagaaagatgaagaaatagaagtagagaccagatcacaaagggctttttgaccatgttagagaagttatattttatcccattggcactaggatgttgttgagtatatgaggacatgatcagcaacatattttagaaagatctcttattctgaagtgtaaagagtggataagaaggagacaaggtaggaggcacgagctaattagaaagcagtctcagagaggctgttagaaatcagaacagaatggctattattaaaaagtcaaaaaacaacagatgatggtgaggcttcagagaaaagggaatgcttatacactgtttatgggaatgtaaatgagtttaggcactgtggagagcagtttgaaaatttctcaaagaacttaaaagagagctgccattcaacccagcaatctcattacttggtatatatttaaaagaacacgaatctttctaccaaagagacacatgtactcacatgttcgtcgcagcactatacagtaacaaagacatggaatcaacctaggtgcccaccagtggtggattgaatgaaataaacgtggtatacatgcaccatggaatactacacagtcataaaaagcatacagtcacgccttttgtaggaacatggatgcagctggaggtcattatcctaagtgaattaatgcaggaacagaaaaccgaagatagttagaagctaaacattgggtactcattataaaggtgaaaacaatagacattggggactactagaagggggaggaaggagaggggcaagggttgaaaaactacctatcgggtactatgctcactacctgtgtgtggtgggatcatttttaccctaaaccttggcatcacacaacatactcaggtaacaaacctgtacgtatactacctggatcaaaaataaaagttgaaatcagaatgagaaggagcgaaggagacagcgacaggaggatggagagaagtgggcagattcaagagagatttctcaagtggacttatgaggacatgcttattgatacgctctgggagtgagggagagagaagaatcaaggatgacttctacactttcagcttaaaaaaccgggagctggtggagtcatccattgaacttgacagaggagcacgtttaggcaggaagatgatggtgtttgaatgtctgcgaagggaaaaactgaactgggattcaaatcagaaaaaacggtttgaagtcataccctcttaattgcattttctatcggatggtaatggctttgtgacaggctttactgataggtgatgtaactctgcctctgacagatgaagatccaaagcatcctcagattttcccgaagcctgtttcagcaactgtgtagacagcacacacaaaaatctggggggaagtcctagggctcagttagttgattggatctattaaagtagcattggagaacacagttcagtctgagatttcccaaacatattgctctataatttatttttacccagaaactgaattcgatgtgggatagggattataaaagccttcagattccagatagaatctctgaatagaaggcttttgggccacatctagtaatctcctttcctcactccatttctgaacttcttgttcacttcttcgctgtttttaggacgttcttactacactcctgcctcaaggcctttgtacttgttttctctgcttagggcgttctttcccgcaatatttgcatggcctcctccctcgcttctttatttctatattacctatctttattaaagctgctataaaaaaaaaaaagcccacacctcagtggcttaacataatagaaactttccgttcatgcaaactttacaaaaattttctggtcaacaagtagatttcctccaaatggtggatcaggggggcccagggcacttcgcttttgtggctctgatgtctttaacatacggatttcaaaatcactgtgctcttgtacataagaatgaaaaagaacaaggaatattacatatgtggtggtggttattggaggtggggttatgagccaggcttcatattcatgagcatcacttttgctcacactccattggctcgaactcagtcatgtagccaaactaatggcaagggagactgggaaatgacagctagctgcacaattaagagaaatgagtagacttgtctaatgagcagctagccagtccctaccacgaggactttgctcaaatgtctccttctccatggaaccttctatgatcaccctttataaaatcacaactgctccccatcttcccctcaatatttccatcccttttccatgcttcatttttttcctctgtaacacttactgtatcacaatctatagattttatttctttatcttgtttactgtctgcctccccttcctcccaatcggatgtaaggtccatgaggcagggattgctgccgatattcacggccatatcaatggacactagtagaccctcaataaatggctgttgcattgtgattacatatatgcttcacctagaagtagtctcatctggtggcacatttactcatagattgacattaattctctattgttttttccccagcaaaatttgtcaaggtagtttgtcagtagggagaaataaagttgtcaggtggctcatcaaaagttcaattttgagtactcctcctgtgtactcataatgttttataaatacttttatctatgtaagcacgtgggcttagacacaattctaggattaaaacagaaagctctgtatccatattttcccttttttgtacctccttttatgttctctaccattttttttgagtgctgttagtgaagcactaggctaaatcttgggtttctgcaaaaaaaactttaatcctcacaacactctaaaatgtttattgttctaattttaagacgaggaaactgagggctaaagagattaaggaactcgcccgtgttcacgtactcagctgataactggcagcatttagatttggacttactttccatacagatattcgcattgctaaccttcaggtttttccctcatcgttttccacatctactcaaaagttgctaatcatttccttaatagtgaggcataaatgactgagaaatcttgatatattatccccctcaggagcacttcattccgacaagacacaaactttagggaaaatgaacaaatgtctacttgtacaactcaagcaccaaccaggtatggtagacatgttggcttaaaaataaagttgatgcttgggttctgattctgataatgacctacggagggtatggcctgaggaggttactaggtgtgtgtagaaatcaatgttttgttttggttttccctcgggaagggtcaacttatacttgaatccttctgaagtttctcaaattacaagatggtcatttattttacttcaatcaaaacaacaaagtactgtccgggaaagatgtattgccttgacttattctcaatttatgcttattttggaggcttgtagaagtaaacctgatagaggagggcaaaaacacacacacacagacacacacacactgggagaaaataaatttaacacagtttagggattgactttggttgtatgacatcacaattgcaagagttggatgccattgtaaacaagctatggaaagaatactgttaaaagtaactcattaagtggttacatggtgtagctcatggacatatggcacagaaaaaagataaagctgtctttacataacataaaactgtattctgttatgtaaatgtgtgcttgtggcttgcagtaaaattcctagtgaaacattacctctagattcagcagtactatacctcaggccacatggatgtaagtaaagatgatgccctctggaaaactgagttaggcaacaacaagtgcatccatgaggatgcaaatttcaatgttgaaggtgcctgtgaagaatttgaacaaaattgttgcatgaaatatgaatgaagaagtgtgatctaatgacataatattttgtactatataattttaaagtagtacacacaatcaaattaatgaattaaacattatatgtaaacaggtgatcattgtatctccattttctaaagtttctatgttaaaggtgatcaaaaaacttggagagagggacttctcatttggaaaatgggatagtcacctttgggtatgtgatgtatcaatctctagaacttcagtttcttcattgaaagcatataaaaggcaatccaaaggatgtatggaatattaaaagattccactgtgaaactatctagcactttacctgaaacacttgttagatcccctcaccaaaatcatgccatgtgatttggcagtctattcctcttagcgtaagagtagcccgacagaaaatgttcattaagagttaatgttaaattcattgaatttagcaacacatgagtagcgcttcctttctgattatgcaaatctctcaccatcgtaatacgtgcttcctttaatttcattgggaacatttgtaatgtaaatggtaacagagccaatatttcaaacagaagccattctttctaaaaaaagctaaatgtctaaatgtattgaaatgcttctaaaagtaaaatatttagcacttatttgcagatgggtaatgttaaatatctcactcattattattactaccacttgtctgaataaatcctcccataagcattaagcaagtaggtaaacaaagaaataacacttcatgtgatgaatgccaatatgaagcacgtttaaactgttctgtcaagagacaagcctggaaatgctaactgtgtttctttgcttttctgcaatcatctgaatacataaattcaaattgcagcttttaaaacttcaaatcgaggcttttgaaatttcagaaaacacatgcgcttggaaaagcagattataacaaggtcccaacgggattttgtcaccatcttttttatatttcaaagtataaaaaaaatctagataagaaatgactaccaaatgttttcatatttaaaagatgctgtttttttaaaaaattaaatcactggaaaaaaagttttccacaaatatcgtgtaaaaagaaagacagcaaaaagcttagccaaagcttttactgtttaagtgatgatttattctgagagttcttaagagttttctaaattagtatatggttaatatccataaaatcatatgcaagatgctgtctttcaaattgatgctgaaggttaattataaaatgtacttaattatttatagtgtcccattgagtcccagatactctgtgtccaagaacactgtaaatacagaaagtttagcagaattatattggaaaggcagtaattcttcacaaattaacttattgatataatgcaatcccatttaaaaattttcagcgagaattgttttataatttgactgaatgatacattacataagttagaataactaaagtgggagagcgggttaacctaccagaaattaaacatattttaaagctgcaataattgacatagtgcattactgtcacaaaaatctacagtagatcaacaagcagaaacttaaaatatcatgaagaaagcaccataaatcaattcagaagagatggtgctgggggaaaaaatatcagtttctgaaaaactcttcaaggttagaaacaacactatataaatttaagatggattaaatatttggttgttcttttttaacaaatgaaagagtaaaggatcaagaataaatgagaatatctgaacaatggtaaaatggccacaattttaaggatactatcaatgaacataatatcaaagaaataaactgttaaattttatttagaaaaaactactaaaaggcaaaaaggaagctggaaacgtagtctcaattaatctatgtttcagataatgtgaaaagagctcttaaaaataggaaaacacaggaaaaatgggcaacagacattgccgataattgacagtggaaactaaataaatgacaaacatgtacacacatacaacattttcaactttcctattagtagaatacttaaaatatctatggcaagctttttatttgttttattggtatatcaattataatgctcaatagtggcaaaagtgtagtgagacaagtattttgtaactgttggtgggagtttacgagtgttctgagtaccaaccttgacagaaattcaacaatgtgtatctaaatccttaggattcccattgttaacttttcattctcattccagcagatacatgattcaaaatgtataaataaatgtgtttattgtagggttattcattataataaaaaatgaaagcaaacaaaattcctaataacacaataatggtgaaatatagggtacccctatatatcttattactaggatcttaaaaaatcaagtttttaaagcgtaattaatgacctacagagacacatagtagaataataaatgaagaaaataagcatacaatatagggtttgaacccagtaatacatataaatctcaactatgatgaataagcacaacatctctcctctgtactggatattcttgatagaaaaaaatatgctagtaaataatttgagacatatttgaaaagaggggagtgtttgatttagaattttctaaacttgagggttattattatttttttggtttgatattactttttcctgctccttaaatttttgtttgtttggggggtttggggttttcttttccttaaacgtgtctgcttctagatgaaagttgaaaatgtttaaaagccttgccaatgtgtctaggtttttcaaatgtaatcagattttagcaagattttacttaactaaaagtattcagaacactgtgcaaaatcatctggagtcaaatagtaatggaggcaatgatttgcagagtagaaacagagagagagaaaaagatgagatagaccctcaaaatctagacccaaggaattaaatctgcttggaacatttaaacaaataaaggatgcctgtactatactagacgttttcttcttccacaattgattctaaggtcagaatctgaggggaaatggtgctgttccacattctaaaacaaactgccagcaatcgagaccagccacttccccatagggtttactctaaagcaacagggattattatctctattccaagcaatttccaatctcctctgtactccgtgtcccaggcaagattaaaaagactcaggtaggaaggggtagtaagctttgtggggagtgcagtttgtggtaagggacagttccttctctttcatctctctgagtcagaagtagagacttcgagagaatcactgagagtaagtatgtagactccaagaaggaaaaagcatcctctcacttcaatgaatgtttggaatctgcagacctccttcccaggtctgtgtagcttttggagaggccagaagagcaccgtaggcattcctttggctttccatggccaagcacatagagtagaagaagaggaggaaccgtaaggttaaccatacataagaaatcaacaaaaggctttgaaattgacttttcctatttttcaatttaaataagagagaattgtcaatgattaaaattcataaaacgaagaaagaatggactcagaaaatagcaaacatgaaatgttaattattagttcaaaagttagtttaccgtgttttctctgccaactgattgctaatgactaaagtccttatttccagctttcctctctccccgagctccagatctcttgatttattaaactagtagtttccccaaaatatatgagacaacaaaatatactctcagctgaagtaaatagcattcatcttcccagtcagataaggcagaagtacttctagatcagatgttatattcgggataggttaaaaacagaccctgctcccagtgtcccaggaatgaacagtggatgtgcttatttctcattgcatgcgtgtatcaaaatatctcacgtaccctacaagtacatacacttactatgtccctacaaaaattaaaaacaataaatcataaacatttgtaaaaataagcgaataaatgtataaatgaatttaaaagagaatagacagaggggagaatgtaactttacgtgtcccagaacagactttgaacaggctcttatcatataggaaaactgaatgaatatatgcaagcataagtccaataaccagattctgatttacagaatgatcgcaactgtagttctctcaaggccctgtctttgaacaggctgtgtcttattcctgcaacatgctgatctatcttcatgcttcaagactcagatcattatcttctctgggatgtctcccaagcactgccccagaaataacttctcctcctataatacttaatcataatccttggcttacatgcttgtttcttctcattgactatgaaatcctcaagacaaggtatataacgtatatatctttaatcctaatgcccaattgagctcttagaaggtagtaagctcccaatacacatttgttaatttgaagcaaaaaaaaaaaaatagctaatcattcaaaaaactgaattatcacaaatgtccatctaaagtactatatttacacaattaaatgctatacagccaggttaatgaacagactaaaattatatgcaacatggattatcgtaaacataattttgaatgaaaaaggcgagacacaaaggagtataaagccatacaattccattttcataatattcagtaccggcaaaataatcaaagttgacagggtactggttatacttggaggcagtgactgcaaagggataagaggagatttctgagattctgataatattctatttccttctctggttgtacagtgtgttcaatttttaaaacactattgggctatacagttaaattgtgcagtgtcctgtacgtatattacacttcagttaaaagcttccatggaagctacacatagttcccaaaagacaacaaaacaaaaaattttcaattattttaagcacaaacaattttgttcagctgtcttacaatcgaatatgtaagaataaatttatggctaattagcatagagttatatgcattttcataattaaaacttccacgagtacaacatatgttaagtattttaaatcagtttttctctttcctcaaataaggttgtgagtcataattcggaaaacagtttagcatgtaataatttagtgttttattttaaaccaagctgaagccacataaagcagaactgctcaactgagccctatccaaatccttgacccacagaataagaagcagataaaatggctgctacttaaacaaaacaaaaaccttgtttatatttttgtcctctcattttccataagtatactttaattaaacattttaaaacttgtaactttaggttatatacttactttagttggttctcaaccagggacaattttgtccccacccccaaccccccagcatatttggcagtgccttgaaacatatttggttgtcacagctcaggggcgaggtgttactactggtatccagtgtgttcaacaggccagggatactgctaaataccctacaatgcagaggatagctgctcacagcaaagaattttccaaacctaaatgttagtaatgctaaagttgagaaaccttgctcagatataatgacataatgttgttagaatttttattttattcattttaatgtatgtatgtatgtatgtatgtacgtacgtatgtatgtatgtatttgagatggagtctttctctgttgcccggggtggagtgcagtggcacgatctcggcttactgcagcctctgccttccacgttcaagtgattctcctgcctcagcctccctagtagctgggattacaggcgcctgccaccaaacctggcaaatttttgtatttttagtgtagacggggtttcaccatatttgccaggctggtcgcaaactcctgacctcaagtgatccgcccacatcggcctccctaagcgctagggttacaggcatgagccactgcgcctggccaggaatttttgaatcagaatttttcttgttcgattttaatctcttatcatttagagattcttgaaatattgaaattactttgttcaaagtgaatgaattttcttaaattatgtatggttaacatcttttaaattgcttatttttaaattgccatgtttgtgtcccagtttgcattaacaaatagtttgagaactatgttggaaaaaaaaataacaattttattcttctttctccaggctagaagaacaaaagaatatcttgtcagaatttcaaagagatttaaatgaatttgttttatggttggaggaagcagataacattgctagtatcccacttgaacctggaaaagagcagcaactaaaagaaaagcttgagcaagtcaaggtaattttattttctcaaatcccccagggcctgcttgcataaagaagtatatgaatctattttttaattcaatcattggttttctgcccattaggttattcatagttccttgctaaagtgtttttctcacaactttatttcttcttaaccctgcagttctgaaccagtgcacataagaacatatgtatatatgtgtgtgtgtgtatttatatatacacacacacatattgcatctatacatctacacatatagatgtatagattcaatatgtctaaatgtatataattcacagtttttatctttgatttgaaattaattttagattttacttgagaacttcacaacttcatataattttaaaaactgaagaccagattgtggaatcataaaatctaaatctaaatgggaatcacttttttaatctgtcctggttacctacctggagatttgagaagagtctttaaaaagaagaatccattttcttagggaagatctggattgccagatcagtctcaccacttcagcctctacttaaaggcattatattcccccgaagcaatgttttgttttagctgatttgtctgggggtgtgggacgtggtgttggttcacattccatttggttgaatagacatccagcttattccagtggcttttcataccgtcctactgtgatgtctgcttattactgattacttcccttggctgactgacatgctctgattgtgcaattggattaactttcatggttttagttttaggaaagcagctcttttggatctatttcattttagttgtcaagcagaaggtgaaaggggaagagaaattaatatttaatcattccctgttatgtgccaagtattagatacatttacagccactattttatttaatcttcatatcagattttgacaatggttgctattatcctcattttacacggtcacataatcaaagggaaatgaaattggtcctttatcaatgattcaggtgctttacacatgtaaattagagtccaatgtcaaacgtttatttctgtgaaacaagaggtttacacctgaacaagaaataaagtataaaaataaaatatggcgtaattcaataaacaaatatggagcactgactatacatccgatgttttactaggtatttgggattcaaaaatagaaaagagtgggaatcatttgaagatggttataccctagaacaatgaactcagtcttttcttggaaatttatctttcccaaatgtattgagtgtcatatatagtaatataattgataattcattcgaaacatatttagtggcattttcttattaattaatatgcatgagtctattttctcctgaaagaatctagatcagtgctttcaaatagaactcccgtgatgatgaaaatattctgcatcatccatttttgtaacgactagctatttgtgccttttgaatacctggagagttggtcgtgtgactgaggaacttgagattttattttagtgaattttgattaacttgaatgttaatagcgttgtatggctaatgggtactgtagcagacacagtaactttagttgacaaaaatgaagtgttaacaccatggtgattttggaggtcttgggaaagggcatacactatgtggtggtgaatgagttcgagaaatttagggatatgaagtaaaaaatgaggactccagaatgaaactacccaaatttgaaccacacctttgttgcttgctagatttgtgtcctgggagctggtatttaacccctttgtctcagtttccttccatataaaatgaagataattggatctacctgatataattattataatatgaagataaactaagataataaatgtgaaaaggttagcacagtgcctggcactgtgtatattgagagtcaatactctcaatgtcagttacctcttaagatgataatgcaatttctcagcagcaagctacggtatgctatggcatgctatgatacccaagaggctgatgaatttgttcacattgttctatttctgatagagagataggttttcagacactaactttatttggagtgttgctttaccatctcacatttttctcttaaaaaatttatgagggataatataatcgtttattttctacagagatttatctactgagggggtgagtgtttcagtcaatcagctctgtgctcagatagaaaactgttggtatttgaggtaccactgggccctcggtcaagtcgcttcattttgatagactaatcaatagaagcaaagacaaggtagttggaattgtgctgtaattcattttaaacgttgttgcatttgtctgtttcagttactggtggaagagttgcccctgcgccagggaattctcaaacaattaaatgaaactggaggacccgtgcttgtaagtgctcccataagcccagaagagcaagataaacttgaaaataagctcaagcagacaaatctccagtggataaaggttagacattaaccatctcttccgtcacatgtgttaaatgttgcaagtatttgtatgtattttgtttcctgggtgcttcattggtcggggaggaggctggtatgtggattgttgttttgttttgtttttttaacctgaccgtttgctttggctatatgttttgttgtggctagaaaaaatgatgatggtgaatggctttacattaatgaccaaatgccaaaatttataccacaattttttgcataaattattctgaagaatcagactgaagaaatggcgaagtatttaattcagtggccaggcatgtactgacagtatttaagctgaaaggacgtggtctggttctagttaaacaagtgtcataaatcaaaattaattattcacacctgtggtatggacttaataattaatgtacactaacgttcgccacaagtttatttatttacttacctactgatttattaacttgtgagttttcatctttccaccttgcatactatataaatctaacagtaatactatttattaaattaatacatatttattttatataaagcaagtggtacatatgaatttatagtaaaaagcaacatcaattgatccagcactattcattcaaagacaatcatttccccactgtattttcatggcatctttgtcataaatcaagagaacttgtatgtatgaatctgcttctggattctgtatcctcttccatttgattaaatctgtactttaacaacagtacttcactggcttaattacaatcttttttttaaaacaatcctaccgagctataattcacataccattaaactcatttaaagtgaacaattcaatcgtatttcggtgttacttttttaaggtgtgataaaatatataacataaaaaattgtcattttagtcatttcgtgtgtccagctcagtggcatttattacaaccatcaccacagtttatgccccacccccaatttttttttttcttttttggagacagagtctcgctgtgtcgctcaggctggagtgcagtggcgcgatctcggctcactgcaacttccgcctcccaggttcaagtggttctcctgcctcagcctccctagtagctgggattacaggcacctgccagcatgcccagctaagtttttgtatttttagtagagatggggttttgccatgttggccaggctggtctcaaactcctgacctcaggtgatccgcccaccttggactcccaaagtcctgggattacagcgtgagccaccgcgcccagcctccaaaattttttattactccaaccagacagtctgtaaccattaagcaatagttcccctttctctctcttcccatccgctagtagcctctggactactttctgtttctatgaatttggctattctagatcttttatataattggaattatatatttgccactttgtgtctgccttacttccctcagcataatattttcaaggttcatctatgttgtagcatgtgtcagaacttcattcctttttatgactgaataatattccattgtatgtatatacgcaatcattttatttaaacattttggatctggttgtgtaaaccttccactttgttcttcctattcaagattgccttggctacttttggttctttgaataaattttagaactatattgtctatttttacataaagccttccaggatattgattgaaattttgtgaatctggagctcagtcaacatctttacgatactgagtcatctaatttgtgaacattttgaattgtgtcaggttatttattgtattttttaaattggtgatgctgacattctaataacagatcatttacacgactgataaaatatttaggaactaaaataagtaccaattttatgacattaaaaccataatgtgcgcttaagtgtctctatttcaagcaggtagttatttgaaaaaaaaaaatcccttcttggtttctacctttaatgattgcaaaacatctgtgtaaagatacagacttttatgtatggagggaaggtggtgtcccagcaattaaattttatagctacataacaatacaaatgaaatcatccctcataaaaagagaacaaggaggaaggatacccaaaatgttctacaatatctcagtacatcttatgacaaaaagaagaacaaaaattataattgtaggaaatgtgagagaactatctaaaatatacaatagcagctttgtgggttgtgaaagagtcaaggttttatgtgtcctgcaacagaataaaaagtcaaatttttatgatagaaaattaaaactgaggttacgaacaccatcatgtatagacttatattactacagcatccataatatctgtttcctatgccaaaattataattttaatgcaatgtctttgccattaaatgccacaggatttggaattttattcattagtcatattaaaattatttaatcatcttttctccatccatatgcctctgtatccctgttagtttagatttagggatagaaagcaaatgatcagtaccagatttaggtaaataacacaagtttttttaaaagtaaaagaaaatggcttataacactggcagacagtcttgatcttcattaaatctcaagctcttacttattacaggagggtagaaataaagcggaccccctccctgtgtcctccagccctacccttcatccaaaggttagagtgggtgatataattggaactagtgggtcatagttactgtgacatgaatatgtcaattccttagtacatagtatctccaaacatatcctaatatcataatcagttggcaggtgactttctccacagctaactctaatatgctgcattctgcgtattgagccaactgaccccttactcttgtacctttattttatttttttttttatttattttttgagacagagtctcgctttgtcatccaggctgcagtgcagtggcacgatctcagctcactgcaacctccacctcccgggttcaagtgattcttctgcctcagcctctcgagtagctgggactacaggcgcgcaccaccacacccaactaatttttgtatttttagtagagatggagggttcgccatgtcggccaggctggtctcgaactcctgacctcatgatctgctcacctcagcctccgaaagtgcggggattacaggtgtgagccaccgcgcccggcctgtacatttatatttcattactgaagagagaaaacagcaggtgaagataatatagctatttctttaagggagtggtggacagggttgctttaaactgaatatagccattagcgtaaatttatgggtagcttcatgcaatgaaggctcatgaaatgatatcctcattcttgtctaatacataacttgaccttttacagcctttaacaatgatacccgtaagagccacaaagtggggatgttattaaagctagcctctgtgttcctctctctgatcatctcattctatgatcttcacccacacttctgactcaggtgtttttaatatttatccctcttcatatttctttgtattttctctgaacatgcatgtgggtgtaggaggctctctcgccatcatcatcactctcttcctctgtgtttctcacttttaggctaattttcatctatgaattgacacgtatattataggaatttatttttatatatttattaggaatcttctttttgttttttttttttttttgagacagagttttgctctgtcgcccaggctggagtgcaatggcacgatctccactcactgcaacctctgtctcctgggttcaagcgattctcctgcctcagcttcccgagtagctgggattacaggcatgcaccaccacgcctggctaatttttgtattttaagtagagacggggtttcaccacgttgatcaggctggtcttaaactcccgacctcaggtgatctgcccacctcggcctcccaaattgctgatattacaggcgtgagccaccgcacctggccatgaatctacttttctatttgcatatttgccactctttttctgccccagttgtttatgtaacacattctcttctgctctccttccctgaccccgttaatcccagtttcatctctttcatgtctttttattttgtgtcccctttcctcattcttcattgctctttgtatatgttatatgtgggtatttttttaactacccatttatttaaaaccaaaatatgctttatcattctttatttttgaacaccgagtcctagaaaggttatgtgacttatttgagaccatgtagctttctatttaaatataaaagtgattccaaaataaacagtaggggttttaaccttttggtgaagctcaagtgatttttatgtggataatatcctaatattaaaatggggatttattttcttttaaaaaaactatatgagtttttgctttggtttttgccctttttgagaactagatgctgtgttttaaaattactttctagaaccttctctgctgtggaacatttacagttgtgtaatatagcaaaacatgtttatgttgtttcagaattagttaaaatcctactatttttaatgtcaagtaattttacaggtggtgtacgttatgcattcctattagttttaataaatatgttgtcattttgttaaataagtttaaatttttcatcgcattttacatgtaaacagtaatttactatctacacataaaataccatttacaaataagatatactgtttatatgtaaatggtaaattactatttgaatttgttactgcccagacagtataaaatggtgcacataaagaaaaaagcattttggaaaacaattaagaaatttggctggaaagtgaattttagttaagtgcatcttattcactttaccgaggaaaaaggtaggtttacaaatacaacatatataacaaacctttaatatgggaataatttttgtaatattgataataatacaggtattattttcaaaaaatcaccaaataaaaattatgaaagtaaaaatacagtgcaactcctagcacaaactatcttccacaatatacagttggctgtatctaaatttccagaaatctggttcattttgtattaatctctaatcatgttgcttctaaatatgtatctgaggagtaaacatttcagatttattttcatttgtataaggtaaatgaatgtttagtctttttccagacgtatttgctatgtaatgacagtcattattagtcgtcagtataaatgtgaatagcaaaaaggagaaaattaaataaagctagagcttggctttccgactccttgctcaaaaatggacactttgtccaatcaatttcctatcacaagatgacgattaatagattgttctaatagttaccattcagtcctgcccttaacgtgatgttttttcaaccaaataatagaatcttcactggcattgttaccatattgactggtatttatggaaccccggaaaaaaaaatgctgtaaaatatatagtaggaagtataataatcattataggaaatcatttctctagctggaagtcttagcagggaccagatagttccactggagcttttatgtgctcatgattttctcccttgaagtgtatttgtaacacagttcacacagtttttaattttataaatctgtgtgctaaaacgctattatataagaaaacgggccgggtgtggtggctcacgcctgtaatcccagcactttgggaggcccaggcgggcagatcacaaggtcaggagatcgagaccatcccagccaacatggcaaaactccgtctctattaaaaatacaaaaattagctgagcgtggtggcatgtgtctgtaatcccagctatttgggaggctgaggcaggagaatcacttgaaccagggagtaggaggttgcagtgagccaagatcatgccgctatactccagcctggcgacagagcaagactctatctcaaaaaaaaaaaaaaaaaaaaaagggtgttcacctatttattgggcatatagtctgatagttcccagaaacccattatcttgaatgttttctttatgtaagttcctggaaatccattatttggatgttttctttatgtagttaataattacagcaaagctgtaattaaattatttattcaagagctatctattaaaggactactatgtgccacattctgttctaagcatatcataatcacttcccacccttcccttatttaaaggacatgcataattttatagggcttggcattataaatattcatatctctaatttatagttgctaaacagtttgaagctgagggttgggggaagggagtagtaatttaaagtttataacataagcatccttgactttgcctcctataatttcacactgacatgaggtttattactaggttgtgtgtcatgagtacatctcaatttgctctgactgttctggtttttgcctgttatcctatcataatttttaatagctccctctttcattgtcataagtattccactttagaagataaaatatatagagagggtcactctagttatgagaacaaacatcaggcttttagagctaggcttggtccagtgctcaataactattattatcatgattgcttttgttcttagtagcatcatcgtccttgtcatcatcatctaccttcctaatactttagttcagctgagaatttcggcctatccaagaaatctgattgccattattaccgaattaatcactctttaatgacaatagtatataagaatacgtgacatttaactttccaaattattgaaatgttacgctgtgtatggaaaattctttctaaccgtgttttttctctactctcaaatcgtaacaatcgtcaacacagaagaagacttttatgaccaaatttgtggaatttttttccccatacaccaaacagcaggcaccagctgggtgtctctaattcagtcctgacactatccacccagagatagtgtcagatcccatagattgagggctcagtaccgaggtctgcctcctctgcacccccctagcgcacgcgcgcgcacacacacacacacacacacacacacacaccagtctcaagtccaggcctctggaacttctgacccatgggcttcaagttggggttcccatgaccctctctttgggttcaactaacttgctggagcagctcacagaactcaggaaaacactcgctttcacctgtttatgataaaggatattgcaaaggacacagatgaagagatgcatagggtgaggtatggttggggtggagggacggaaaggggcatggagcttccatgccctccctgagtgcaccaccctctaggaatccccacctgttcagctacccggaagctcactggactctgtcctctttgttttttatggaagcttcatgacatcagcattccttccccaagggtatatggtgggaccctctaacaggaggtttttaagacctataatctgaaaggcgagggaacattaaagtgaaaggagagcaggagaaggtcagaggcctgcccctgagacccaacgcaaccaacattataacaaaaaactgtaacaagggctatgggtgttatgagccaggaacctggatagaaaccagtatgtactataataccatataggcaatgccaagaatatggatcagacactttacaaacaaggaaaaagtaaacaggagtgatgaggaggtaatttactgcaggcattaatgatgagattatgaattatggattccacttgctaccagctatgtgatcttatacctactctgtccatacctaagttataacatccataaaattcaaatactaaaagaagacacttccccaggttgtggtgaaaattcaatgaggtagtaaatgggaaatgtgtaacacagtatctggcatattgtaattgctcaaaaaatgttagattaaaaacagtaggagtaatactaaaatagaaaaatgcaaagagcaagcacaaaatcatctctgattctcacctccaaattctccaaaagtctcaccttcttaatcaaagttgtaaatatggctcttggggagaaagctgaactatgtgctactattatgaatgcaacaggtgaaggagaggagagttagaggcagcaagacaaccaaatggctctcgtggaaggcacagaggattttcagccactgctctcctattccgctgatattactttcattttctatgaccaactagcatttcagctaaaatgtgttggaaaatgatagatttttctcctcctattgcctaagaagcccaacaaagccagcattgttttcaaacaccagcattctcacttttaaagtatgaacataattcagaggacttttaattctgaacatcgtttttatcaatctattggcctgattgtaacccagaaatccaagcagaaagcaagtaaactttcacactgcttccccatcccttccccctacctttatttttgacatcagtttccctcattttggcaaagtaaaggaaaagcatttgtagaaggttacactgaagctagataattttctattaggaaacctcaccaaatacaagataatttgttcattccaatataataatgttttaaaaaatataacaaaaatccagcataaattgtgaagcactgatacttgtgtaacaactaatttccatagtgaaacttcattgttgccactatctacatactgaaaatgtatatcaagcatgtaaatgtgtcacttaagtatgctgtgccctagattttatttaaaagttaagctaattttcaactaaaaacaaattcgactattcttagcaatctctcctccccgttcatgatggatttaaaatgatgaagagtataaatgatgatgaaaagagaaaggaggagaaaaatttcataactctgcatcttcagtgtagcatttttaagtaactcctttattagcacaaaggtgtttgcctgaagcaatgacttctagaaaggagaagaaatgacataataaaaggggattttgctaatataaaatgttttttctttccttttgtttctgcaatgcttttacttacatagcaccaaccctgagactagagggagtttccttcctttctaataatttaataatcgtgaaatgatattaaatggaagttttcatatgccaactccttaaactgaggttaaataaggaacaaagattaaaggccatatttaagaccacatattgtaaattctaacccagtttcatttattatatcacctgcaaagccaatatgccatacaaaagtaaaataacagggtgatttttattaaagatcagaatcataccaaaaatgaacttttctgtcaaatctttatactcatacatcaagatgtgagtttatttatgtagctaaaataacttaatactaaatgctgactactatattcatgtcagctgacccctagtgcttcaaaccatagaaaagggataccaaatgctgggttggttgtgtattccatttttgccgtataccacctgccaaggcttataacagatctgtaatgggtttcttaccttttattgtgtagaaaatggattgttggattaggcctggggccagtgaaccatggaaccccaggtttgcaagaaagagtttatcaccctttgatgttatttctgtctcgtgtcagctgagaaggatgagctagattatctgaaagtaagctggatgccaaaatcagcattcccctcatttatccaccttatggttcggggcaagaccactgtatgggtaacaaaagggctgataagggcctgatggagaaatttggtttttctcccttttgattggcttgctgatattagaaccaattacaagacattgacgagagcatttcattgtttgttgctagagaaaatccatcaattttgttgtggaaatgaaagcatttgagctgaatgttgcacttataatttgtgaacattttcagttatcaccgggacaagtatagtccatctttggcatggttggccaagtgtggtgggaaaagagatggaccagcaaatgggccggaaaccaaagtcatcaaaagggtatttcaagaaaactctatttgttctgatggttacattctgcaggcaacctgtgactgatgactgatgcttatacctcaaatgcagtctaaaaatatttttttgtgaaagtgacacattctgactgtgatgtgggtgacatcaacagttttgaataggacagtacttcttggacttattgaaacttttataaaagaatgaacattctgaactcaattgcaatgtaaatgactatcatgaagattgcttctgttggtgctatgacttttgtgacaaattttagaccattgcagttatctcctagaggttgctttattgttttattttcatcagtgatgtgtattttatcagtgatgttagaatcactgagctgctggttaaggaagagaaaaaaattaatattcaggtgctatataggcccttattcattgagaacaaataaaggccaacacacaaaacaggaaaattaatagaaaagacactctatgggtaagatttcatatagtttgggagcagacaaaaactattttaattactaaaataattaagaaagatgttgaggctgggcacggtggctcacgcctgtaatcccagcactttgggaggccaaggagggcaggccacttgaggtcagagttcaagaccagcctggccaacattgtcaaaccctgtctctactaaaaatacaaaaattagctgggcgtggtggcacatgacttgaatcacagctacttgggaggctgaggcaggagaatcatttgaacccaggaggcggaggttgcagtgaaaggagatcacgccactgcattccagcctgggcaaccgagtgagactctgtctcaaacaaacaaaaaaaaaaagattaaaaaaaaagatgttgacattaacatgttcaagtctttatgctgaaactagaatgcagtatgattaaataatcatttctacttcgggtgaaggattagttttcttaaagatacccctttccagcttctcagttcgcgtgtggttaattcccaacgtggcctcaaatattctaatggtttgtgtaatgagtgccaccgttccaccttcttattctccatgcctcatctcagtcctggaaagatcactaaacttgcagttcataactcagtctagacccaggttcaacactcactaactcataactgtgggccacttatttaaatctcttagtgcctctagttcctcatttgtccaacagtgatgcattatgaagcatgtttgcccatctcccagcgtctagtgaggaactaaaaacacaatatatactatcatactttattacgaggagttaaattgtggttactattacaaagtaggttaccataaaattctaatagcagtggtaaggggtaaagatccacgtgccatcacgtagagcagaacttctcaaactttaatgtacggcaggtccttgaataatgttgtttcattgagcatcactgtgttataatattggcaagggaaaaaactgtatctcagctaggggggcactgtctatgtggggttttcttttgtctctgtgggttttcttctagtactctggtttcctcacatgtcccaaactgtgcacgttaggggaattggtgtgtctacattgtccccatgtgagtgtttatgtgtctacgactgtgccctgcgatagaatggcatccctgccagtgttggctcctgtctggtgctctgagttgccaggatgggctctggcctcccaagtccctgaactggaatacgtggcttggaaaatgaatgactgaattaatataaattactgtgaaataaaaattcatatagtattcaataatcataaagatgcgtgacaataattgatgctctacagaagtgctcagtgagctgccatattgattattgtttgtttttgaactttgtggtgagagaaggcaatcctggcagtttatgctttgcaaacatttattccttgaatgaaccaccgccactgcaaacactgtcactcactgattcaccaaaaactgggtaaataattttcctcctggtttttattaatctttctaaagtggatgtatatctcacatttatttctgagtttaatattagaagtgcttggggtctttatttagatgttggatcatgttttgtgaacacaggtatgcagtaggaacttaattcttgtttatcaattagcctatggtaagattggtttcattatatgtcattttgcctaagtcacagtttcccagaatctatcaacaacattaattgatgacttactgaaacaggaatcaccttgagatcttgttaaaatcaggttactgattcaatggctcttgcataggacctgaggttctgcatttccccccctaatttcaagatgctggttccctggtccccttgctctacttcttaaatggtagggaggtagagagtggctatcaagagtctgtgtaggagttgaccaccaatcccattcaatggaatgcatacagtgtgttctgagatactggaaaggcctttgcaaaaagattttgtctcttgatatttatgaagcacattcatccgaccacagaagatacatatcaactttgacagaaaatatgaacacattcaaatgatttatacctttgaaacatagatcgttgtggggttcataacccaagtataactttcccacagattcactcaatttccttcctctttctgtgcaatatattgtatattgcaagaagctcacctccactcaccttattcctcaggctttcttctcaactatcttctgtatagatttaaccagtgggaggcgttggcaggagattggagagcaggagaaggggagatttcagggtatttctttccctctttcactgctttgggcaacagctgatacagagtaagtggccaaaaaatactagctattattaggtcttctaataatgatcttctaaaatcactttttcagtggttacccccattgatttgccatgaatgtctcttcagacatctttgcaaagaattgagcctgactttagatactcattcaaaatcaaaatcagtaattttaggattgaggactctggtattatttaagaactcttaactgtaccaagcctcactcccatttctggctttcccctatatatcagttaagtaataactccaatagtgtaaaatttgcaatagtgttatgtaacaaatcaccctaaaacttattgacttaaaattatcaccatttataattgcacacagtctgtggggtcccgtgagctgttgtgttgttctggctcactcatacattttcagtcagctaatgggtgggctaggggctggcttatctagcataagcgcagctaggatgattcacctctgctccatatggtctctcatccttcggcaagcgctcctgggcttattctcatgcaagaaacaggattctaatagagaaggaaacaagacttcttgaagcttaagcttggagctggctcactcatttctaacacatttttttaaccaaagcaaatcacaaggcaggcccatattcagggattagggaaataggttacaactcctgatggtagcaactttaaaagtcacattgcaaaaagatgtgcatacagagaggtcaccagtgcaatctaccacaccttgcaatctattaagtttctcaccccctcacaagtaaggtattcagttaagatgcattcctatgtattcagatttctaatcaactaatcctgattctcacgtaatattgacacagtatcaatattctcaaaagccaatagtctagagggtcacaaagatcctcaaagatactttatgcaaaatcctaggagtatagaaacagtaccttggtttatgtatacattcagtatttattaagtgtttccaatatggtataatgttaaggaatgaggatagagttatgaacagacagacacttgtctttatggatcttacatttggagggggacaaacattaaaatggattatataattacaaatgcagccgttctcattgtcttttcagatttctcagggtgtagactgagctactataataaaaataccccaagtttccatgtttcaaacaatatagatatgtgtatctttcccacataaagtccagcctaggtacgtagtctctgctctaaaaaggaacacaggctagcaaggcagctatactattctcaatataatactgcatttcaaaatctccatgctggtcccacaaatatccatgcactctctttcttatcatcaagagaacacacagtgccttcccaagagagaccagtcaaagtctcattcacttactgcatccagctaaaagtccattgtctgtggatgatgcactgtcttctccatcagatcaagatatggttcctcatggtccagtgacctataaagtgaaagttatgctatctgctcctaccacaaccaattctctctttttaaaatttttttaaatttttgtgggtacatagtaggtgtatgtatttatggggtacttgagatgttttgacacaagcatgcaatgcataataatcacatcatggagaacgggggatccaccccctccagcattaatcttttgtgttacaaacaatccaattatactcttatttatttttaaatgtgcagttacattattttgacgatagtcaccctgttgtgctatcgaatactgggtattattcatttttcctaagtattttttgtacccattaaccatcccgctgccccctccccgactcctccactatccttcccagcctctggcaactacctttctactctctatgtccatgagttccattgttttgatttttagattctgcaaataagtgagaacatgagatgtttttctgtgcttggcttattttgcttaagataatgacctccatttccatccatgttgttgcaaatgacaggatctcaatcttttctatggcagaatagtactccatttgtgtatatgtaccacgttttctttatccattcatttgttgatggacacttaaattttttccaaaccttggctattgtgaatagagctgcaataaacatgggaatgcagatatttcgtcaatatactgatttcctttctttgggtatatacccagcagtgggattgctggatcatagggaagctctatttttacttttttgaggaacctccaaactgttctctatagtggttgtactaatttatattcctaccaacagtgtgcaaggttttccttttctccacattctctccagcccaggcacaaagacagcagtaagtgctggacgaccacctatgcaagacctagactataaatccagtacttctctccctctccacacccccatacccaccactccattctgagttttcaaatgtaagctaagctaaatgattcaataaagctttttgaagtcaaggatgagaaaaatcgttgctttttatgtaatcccaccatcaaagtaataattgcttagttcaaattgtggtgatgcaaacaaggaaagcaagagagcataaaacgggtggatctgacgcagtccagaagtggaggcaatggttgtttttagataattattagagaagatactgtgatttggtttgaaggcaaagctcactgaagttctctagttctagatacacctatcgaaaaattcttacccaaataaatgtctcagtgataagagcagcctttccccaaatgcctaagtgtttttgttttgtttttgttttgttttgttttgttttgttttgtttttgtttttgttttttttcaaaatcttcctctggaatggatgctgaccttgtcattgacttattcttcaccacaactcagtcatattaatcttgaaagagacagagaggccactatctctgctaataatttacataattgtttttctacaatttggtgctaattaaaatgtgaaaggggtagtgatgatataggtaaatgtaataaggtcattctttgttcctgagagcaaagataatgtcaccagaaaggattgtctgtatattcacataagagcaggaaacaggaagagagacacagtaaggtaaaatagcatactagtatatcacgtagtctggtatagccaatgtagaatatttatttcaaaaaacaaataaagataaagttctgcttcactttgagaagctgttttttttaatcctgtatagttagttcgacatgttactactctgcctggttcaaattttgatttcactctgttccagttatatatgctatgcaacaaaccactctaaaagttactggcttaaaataagatagttttacgatttctcataattctgagagttgactatgatattcatctgcttcacctgatatcaaccaagacactgggaaagctggaaagtccaaaatggcctcactcacatgactggcagttggtgctgcctaccagctgagaactcagctaaagctattggccatgagcctcagtttgtttccattgtcttctccatgtgtctcctttggcttccccacagcttggtggttgagttctgtgaagaagccttccaaaagaacaagcaccaatcttcaaagacttatcaagcttctgtttgtatcacacttgctactatcccattggccaaagccaggcatatggccaagttcagaatcaaaatgagaagggactacacaaaggcatgaatccaagaggcgtgattaattgtggggctgccaaataatcgccttccacaaattccttactagctgtgtcatctctctgtggtctcagttttctcacctggaaacaggaacaaaaatggccctacaaaaatggactgagatatattaggttggtgcaaaagaaattgcagtttgggaccgtgaattttaaatcattataactaggctcaagcacatctttattaatcaaagtaggaaccgttacagtcaacacatttttgccaagaagaaataagtgtgtttattcctgtagcataaaaattcatgctttgggattcaatgaactcttggaaagcattttcttcatcctgctagttgtggaagcattttccctgtaaaaagttgtcgagatgcttgaagaagtggtagtcagttggttgagaggtcaggtaaatatggcagatgaggcaaaacttcctagcccgattcattcaacttgtgaagcgttggttgtgcgacgtgcggtcgggcgttgtcacagagaagaattgggccctttctgttgaccactgctggctgcaggcatggcagtttttgatgtatctcatcaatttactgagcatacttctcaaatgtagtggtttcgccgggattcagaaagcggtagtgggtcaggccagcaggagaccagtgaacagtgaccatgacttttggtacaagtttggctttggaaagtgctttggagcttcttctcagtccagccactgaactgggcatcgccagttgtcgtttaaaatccactttttgttgcacgttacaatccgatcaagaaatggtttgttgttgttggcgtagaataagagaagatggcacttcaaaatgacgatacttttattttcgctctgcttatgaggcacccacttatcgagttttttcgcctttccaatttgcttcaaatgctgaacaactgtgaaatggttgacattgagttcctcggcaacttctcgtgtagttgtaagaggatcagcttcgatgattggtctcaatcggtcattgtcaacttctgatggccagccactacgcccctcatcttcaagactcttatctcctttgaaaaacttcttgaaccaccactgcactgtgcgtttgttagcagtaacttggccaaatgtgtttttgacattgcgagttgcctctgcttctttacaatccattttgaactcgaataagaaaaacgctcgaatttgctttttgtctaacatcatttccatagtctaaaataaacataaaataaacagcaagtaataagtcattagcaaaaaaaaaaaaagtgagaaatgctcattaaaatgatgtataacataatcacatttatttaagaatgtatttcaatatcaaatggcaagttccatgaatgtgaaaacaacacttacttttgtagtcacctaatgacacatttaagaagctgaaacctgagctcagcacatggtaagacatcagtaagtattagttatcataatttttttagtaattttcctacagagctataaataaaatgaaatactttccaaacagtgataaaactataaagcagcaatacattataagcttctatcctaatctgccttcccctcagggccttaaaatgtgtcatttctgtaaatgttacctctgacatgaaagcaccaacacactgttcagcaattacaagttgattgtgacaagagcctcactctccctatttctttttctcttcctgtcttgctttcccttttccccatcctttcactcactttgataaggcaaactgccatgtagtcacaaaatcctagacaaacaagtctgtacctatgtgggcgatgctgtggatttagtaagggaaacagttccttgataaatttctcctttagccctgggtttccaacccctgtgtcattcagctatagaaatcttctgatattttctcccactggtcattttcactcaggctgccatcaaaatgagactacccaatgttctttccatttgttctgttttcttcctcgcctctgattccctgcctggtccacttagaaagtctaccttttttccttctctcttaataccaccaatctctaaatctgacttctcctttctaatcccatagagcctgccttgtcatctccaaacaagatccatcttggcctcctgttatcctcagcccacagcagtatttcacttacaacgttcgttagtttctacctcagatgtgtcaggcatttagtttgtaccaatattttatttctttttatatctacaccaagcctgcactagacggtccaaggagaaatttaactgattcctgttttgaagtcctccccactccttgggagagttaaagattcctcagtgtgttaggtaatgatagttaatatttattaataacttactgtgtatcgactgtattctaagtgctttgcactgttagaaggagaataacctaagactgtgccaaacagcagtctagaacaaagctgaattccttgcttgcctggcaagggagaatgtggtacatactaaaggattaatacatgttcactattaaattgattgattgtggtggtggtgacagtggtgatgacttttcaagtgtgggtaaagtaattttttccaacaaatccacatccacatatttaagaaaagagagacatttcattctatctttttgtgtgcctttgagaggacacccctggcacccaactcccaggcaaatgccaccatctgtgtgattttccttcatttgccaacgaaggcacagcaggtactactaggttaacctttgctttcgcaagtcttctctcaaaatagtaaacacttcagctgttggaaagctctaatctcaaactgcaaatttaaaaatctctctctggagttcaaaaaatagaaagaaaaaataaaaatctctctcttctggaacataatgtttgaactgttacatattattcacactatttcacattatgggattatgaaatatggttttaggtgttagaaaaacgaaagaaaactattatttgttaacactaaccgagagatttttatgatattcaagtaaaatgatagaatgaattattttaaaaatgcatgaatcttcaccttctgtgaagtgtcatggaggattagttctaactaatatgcctgtaagtaactgacttaatgcgtctattggttctcttaatgctgtaagtgacagaaaactggtctcaaactgatttaaacaataaatatgatcaaggttccggttttttgtttcttgttttttttttttttttttcacatttctctgggttctatttttctgtgttgacctagcagcttcacctgacttccctcttggtgacaaaaatggcctgaagccgtttcagaacccacatctgcaaacttacttttgatgaaaatcatctctttagggaccttctttcccaaagcatccaggaaagactgctctgaaactgactggcctgaattaggtcacatgctcattcctgtactaaatcacacctcacttctacagctaaaagtcattaaatctcaaccaaactctacagctgcaccacaacaaaggtagagaagtaggtgcaaagttcctcaaaggaacgtaagggtgaaagatgattgactgataaacagacaggtagacagaatagatagatgaattaggaaaagataaccaaccaatatctgtcacattgctttgacttgattttttagtcaattaatgaaactgaatggtaattttgacattacaacaatactttccaaatgtaggcaggttgtggagatcatttaaggaaaaaatgtatgaggtgttgtagcagatactgtcggtgccccaccgatatccctttagcacttaccatttttatacgtgcttcttaatttccaacttcctgtacttgcatctctttgcttggggctatctctgctcattcttgggagagagcagaaatgtagcagttatgcccctgtagagcagcagttgatagatcaataccctgtcccccttgcccttcagatctaataactccaagcttaattccctacatctttcatataagtatatatataagtatatatatatacttgaagttctagggtacatgtgcacaacgtgcaggtttgttacataggtatgcgtgggccatgctggtgtgctgcacccattaactcgtcatttacattagctatttctcctaatgctatccctccccagccccccaccccacgacaggccccagtgtgtgatgttgcctgcgctgtgtccaagtgttttcattgttcaattcccacctatgagtgaggacatgcggtgtttggttttctgtccttgtgatagtttgctcagaatgttggtttccagcttcatccatgtcccttcaaaggacataaacaactcatccttttttatggttgcgtagtattccatggtgtgtatgtgccacattttcttaatccagtctatcactgatggacatttgggttggttccaagtctttgctattgtgaatagtgccgcaataaacatacgtgtgcatgtgtctttatagcagcatgatttataatcctttgggtatatacccagtaatgggatggccgggtcaaatggtatttctagttctagatccttgaggaatcgccacactgtcttccacaatggttgaactagtttacagtcccaccaacggtgtgaaagtgttcctgtttctccacatcctctccagcatctgttgtttcctgactttttaatgatcaccattctaactggagtgagatggtatctcattgtggttttgatttgcatttctctgatgaccagtgatgatgagcattttttcatgtgtctgttagctgcataaatgtcttcttttgagaagtgtctgttcctatccttggccgacttttcgatgaggttggtttttttcttgtaaatttgtttaagttctttgtagattctcgatattagccctttgtcagatgggtagattgcaaaaattttctcccattatgtaggttgcttgttcactctgatggtactttcttttgctgtgcagaagctctttcgtttaattagatcccatttgtcaattttggcttctgttgccattgcttttggtgttttcatcatgaagtccttgcccatgcctttgtcctgaatggtattgcctaggttttcttctagggttttatggttttaggtctaacatgtaagtctttaatccatcttgaattaattaatttttgtataaggtgtaaggaagggatccagtttcagctttctacatatggctagccagttttcccagcaccatttattaaatagggaatcctttccccatttcttgttttttgtcaggtttgtcaaagatcagatagttgtagatgtgtggtattatttctgaggcttccgttctgttccattggtctatatctctgttttggtaccagtaccatgctgttttggttacagtagccttagtttcctacatcttcttttagggataacagggagtattaagattcagttgttcacattgatgacttgcatgataatataccctttattggctatcttccctatttcacttcttctcaccctgttgatgtgtcctggaatcacatcccaaaactacttgagctcaaatttttatttctgggtttgctactgggagacccaaatcaagacagttggcttcagtactcaggtacttacaaggagatcatggatatcaattgaatcagaattccatgtcatagcttttcaaatttatatcacaataagttgaaaagatgttgattcttccttccacagtattttctgtttctgtgtgtcttacattctggtgtctcaaaacatggctgcaaccagggaaggaattgaaatttggagtaaatgtcctattttagtaggtctacatttaagacatggacctgaaattgagatcataaacaaaagtagatgtgagcataaagtagaaggtgaggttggagggggaaattgtttggatttactgtaaccaatggagctgcttagtctagtcaaggaatttcaatcatttctgtggagactagatgacttatgttatacaaggatatctctggaaaattcactgtacagttttactaaatctggctgataatatgttcactcaatgttatgatgtcaataatagaatggatattgcctttaaagacaattttaaagtaaatatctcacatattcctactcatttatcaagggctgtgtcattcatggcaatataagataattcttttcactttcaaaatcttccagatgcagaaactttccaatatttgctgtagatgaaagtgtacaatttcacaattcaatgggacaaaaagaattaggaaaaatatgtttcagagagtttatttggtatcatctacaagacctggtatgagacctggttggtgttgtatggaatgaaatatatcagtctgttctcacactgctaataaagacatacctgagactgggtaatttataaaggaaagtgatttaattgactcacagttcagcatggctggggaggcctcaggaaacttacaatcatggcagatggggaagcaaacaccttcttcttcacatggcagcaggaaggaggagaatgagcaaaagagggaaaagccccttataaaaccatcagacctcgtgagaactcactgtcacaagaacagcatgagggtaaccgcccgccgtgattcaattatctccacctgatccctcccaggacgtgtgggggttatgggaacaacagcttaagatgagcttttggtacagacacagccaaaccatatcatagagtttcgaatctgaaaaacaaaagaagctaatttagtttcagaaagctgagatttcatgaaccatttaaaaattcactttataatttttcatgcattttgaagcctttatcctttaaatggaaatggaatagaactattattcgtcatttctaaactgtgcattcatcaacaattttcagaagttaattccaacatgtcttcatcaactctatattacatgttagtacactacatctctattttcatgctataattttttactttttcctcacactttcatctcaccctctcaagatgtgttaatcccctttgctcttttccccatctcgtctctgttgcctttctccccccttcctttttttttaatttctgttctcttttacctgaaatctccctcttcatcttttgctaccaattatgttcttaattggttgaagtgagcaaggtaggaaattctccattttgattccattctctcacatggtttatctttaatatgttttaataaacagtttaacataaatcttacttccaatttaacatgtaaaatttagaaaattggtgaaaaatatgcctgctttttcacccccaaagaaccaagtttaaaaagttttgtgactttgaggcatccttttccctaaaagcaagcttaacagattcttagcattcgtctctgtgtgaaattgtggaaactttaaaaaaactatttgaagtaccaacaactcaaagataaattgtctgttttaaatgcaaggtgctaaaataaaactagaagattgacaatattattcatctttatcactgttctacttaaaatttgaaaattaatgttagaaatgtgagagggtgcatgaaaccttaatggttttatcatttcatctgagtatatatttgatttcttctttctgacattgaaactttaaaattcgccactatttttcagtaactcgttaaaatatggtccgttcttatatttgcaatactcctatactgaaaaccctacaacttcaccattatttaatttttatgttactatatttgtttcttaaaaagattataatattatgtattagttgtctattgctgcataacaattactacaaagataggggcttaaaactgtatctttagagtatcaggatacatatgggtcagaagtctaggcatagattatccatattctttgcttcggggtctctcacaaaggctgcacactaggtgttggccagggctagggtctcatttgaaagcttgccttggaaggacctgcttccaaactcacctgttgttggtaagtttcagttccatgtgggttattggactgtagtcttccttttcttgttggctgatggccacgtttagttccttcggtctctaacatggcaatttgcctcatcaaaatcagtgagagaaagtgggggaggggggaaagagacagagaaagagtgaaattgctagcaagacaaaagtcccaatcttatgtagcctaattggagaagtgatatccttttgtctttgacatattctgcttgtcagaagcaagtcaaaagtcttgaccactctcaaggggaggaaattattaaaggactcaaatactaggagacagagatcactgagtgccattttagagtcttcccaccacggattatttcccttcacctgctggcatttgaaaatgcagctaatactctgggattctccaaacctaatttttttgtataattagagaagtatttgtcataatctgttaagtgtagtaatatattaagaaattgaatttattccttcatatttcaaaaagtacatggggttgggggacagctatgttgtcataaactttaatacatacatgattggaatggattatgaaatatttttctctaagagatagtataaggctgcaaccactgaggctcccaaatacagatgattcatatgtatttagttttaatgcaaagcttctcatgctgatttaaactctcatattttcatatatggtgttttattttttatataatgaatgtctataaaattcctattattttttcaaaagtattgtggcaaatatttcctagtaaaatctaaagatatctttgacgtaatttttatgctctcatttatgttaagaactcaatattgaagtaatgttctttcttatttcctagtaactaaaatccttactatattcatgaagagctgtgcctctattaaaaagcttttattgcaaacagaaatgtcaaaatacagcaaaggtagagctatgtatgattcttcatctgtaatgtaattttaagtatacattttattgcataagcagagatttatacccacatttgctttcagtattcacagaagaattttcatatgtatttcttaaaataacaaaatggctgctttggtgtggggatagtatggtacagcatttattgtgaaaatgattcttatcttccatctttttcaaatggtgagttcagtatgtttaacattgctggttttataatattgcgaatatttttgagaggaagaaacaataagagactgataagaataattcatatttgctcaaagtttaatcagttttttatttgaacaaaaacttggacgaaatgtccaactttcctttgagatcagtgctctccaatgtggtaacaacagcctaccatatgagcatttgaaatatggctagtccccactgaaatgtgctgtaagtataaaacactcaccaaattacaaaacctaagtatgaaaaaaataaaatatctcattggtactttttatattgagtacaggttgaagtgacaacaatttggctatttaagttaaagaaaatataacattaaaattaatttgacctgttttttacttttgtaatgtgtagaaaattttaaattacatgtatcgctctcattataattttattggatgtcattgttctagataaacaatggcaatgttgagaggtgtcataatagggacaattgtctctgtgaagaagaaattatatgaaccctacaacatgtattagccgcagagttgcttagaattgacttactctgtcttgttgaaaataggttttcccttaaaatctctgcctgatgtagccaaccacgattcaatgagcaaacaaaaatcttaaaggggaaaaaatcattttttgagtctattttacacacccagtatcaaaaagaaaaatataaatccacaactaggattatacgggatgtaattcttggatttcttttggtcttataatgctttatacctaggagatgttcaacaaattattattgaatgattgtagtttaaccgtcagttacattttgcagcaatacatttattagtagcaaaatctgagtgtttactaattttcatcacctaatcagcaaattagtactgctcttatatcgctttgcctacgctctactcactggttcaatcagctaattttttcagaattttatggtttataaaccactatatgttgcacagtatttcctatacattagctcatttgagtcacagaagttataggaggtggatcttgtctttctttgttcagaaagagaaatccaggttcagcgaggttaactggccttgtttaagatcagcacgttgctaggtgacagaaggtgttcacttctcactgaactttgcatatcaaaagagatttaaagaattcactttggagagcgggagttatggggtgaatattttatcatgttgtccgtcttaataatcaccaatttgatactaaggctgctagtcatctctaacgaagagaagttactttgaagttggttgattgattgttgttgattgacagaagtattagttttcagaatgaactaattcattaaagaaataaaacattgggtttgttcattccataaataattgaacatttattatgtgtatgataccagcctaagcagatacctaaaaggaatggagattactatagttaataacaatgcattgtattcttgaaaattgccaagagattacattttaaacattctcaccataaaaaaatgataagaatgtggggtaatgcatatgttaattatctcaatttagccattccacagtgtatgcatatttcaaaacatgttgtacacaataaatacatacaatgttatgtgttaatttaaaaataaatacattagaaacggtaaaagtcactaggatcatggaaataaaaatgtttacatttatgtaaatattagtaatataatagagggcatatccaaaatatagtgtcatattaataagatgttgtatgattattatagactacaaaataataaaggaatagacagaatgtttctaaataaagaatagaaattacagtgaagcggaagagagagtaaccctaaacccttcataatcctccctttgcctcgtagtatagcttggaaagtaattatgtggaaagttgagattgcaacaaaggacggtagtacaggagttgcccaaggacagacaattattttctcaaataaactatagcagaagcaaaatggccttggaccacaaaagaaggccctcatgtagacattgttctattctgaagtagaatttgcagtactcaagagaagaggaaagattattataggtggagagactgtaaacaaaatattatggtaggattcctcctgaatagagcaaggtgattgtgtttgacattgaaaaggtatgtttgggcaagagtttgaaaacctttagccaccatgctaagagatcttaaatctttatctctgagtaagggcggtggttgtggttaatgatccttgagcacaactctgtcccattaaagacagtagattcaactgcttctagcattagtccatatcagggagtaaagtgatccgatacattattttcccccagtaaatggttcataaaggaaggccttggctctgccttgtatgtctacatgggagaatataccagaatgtctagaggagcatgggtagcgtaacctttccccatatgcacatacaacaaatactgataatccactcacaggggagggactcatttttaagaattaagttttattttagaagactcagtctgatggcaatgcaggggttgaattacagcaggtagagactggaggtctacaaactggtttgagatatatattttttccggtggcccagataataaggacttgaacagacttcttgctctgggaatgtaaaaggccaggctggatgtaagaggttaggaagttccaaactgtcccacattttcctttcttctgagccctccaaactgtaccagactctgcatgttacgcacttccaaagtcgcttccacattttcgggtgtcttttcagcagtgccccactctactggtaccaaattactgtattagtccattttcacactgcggataaagacatacccgagactgggcaatttacaaaagaaagaggtttaatggacttacggttccacttggctggggagacctcacaactatggcaccaggcaaggaggaacgagtcacatcttacgtggatgggcagcagtcaaagagagagcttttggagggaaactccgcttttcaaaaccatcagatctcatgagacttattcacaatcactagaacagcacaggaaagacctgcccccatgattaaattacctcccactgggtccctcccataacacatgggaattcaacatgagatttgggtggagacacagccaaaccgtatcagtgatgcaaaataaaagaagactgtggagtaaattacacatggagaaaaggaagaggaactaggaagtatagatactgtgagaattaactctctgttctacaaaagaagaaatgggcttaaagtggttccccccaaaactaaaatccaaaggcacataagtcataatgcacactgttacaccgagtccttccagctcttaacttacttgttttactgcactacacttgacttgagttttagacttagtaaatctgaggtaaatgcagattgagaatgagaacaaaatgttaaaaagagaagcagtctcattttcttactactaataggcattgcagtttgtgtgggctctagcagggatgtttgtaccactgggatctaagcatctatttctatattataaatagaaaaattaggttgagctatcgcgactccattacaaacttatggaattagattctctggtatggagcttggatatacatattaaaacaaaataaaacaaaaactcctacccaattgattctgctgtgtgctctagttaagactgttatggttaagaaaataaataatcgctgtatggaatgtatatcgtcctattttaaattaataaaaaaaattttgcaggccttcccaccttccaactcctagagacaacaaatccagatttgaaaatcagtcatattaaatagttgtatcgatatttaccctttgtttctacgttattattttcttcaattttcacacgtatttgttcatcagttggttatgatggacttcactttttttcagtcttacgaatgagatttctccctccaaaaatcaataggcacctgctgattttatttattccaacatgaagttgcagaaaatgaatatggccaaaaatggttaaaaaaaaaaaagcctgttcttcaaaagactagatcgtcagttgaagcagaaaattatattcagtgcactggatttatgcattgttttagccttctccaaccaatttagaaatgcattttcttataaaattgagattattacaaatcctgtgctaagcagctgaaataatgtgcctatgccaaggtcatatcttaaaagtttggaggagcacactgcaattgaatataagtttataaatgtattccacatacttttctgatatattttaataatttaatttttacattttacctatattgtcttcattttcactttacctttggtggtgtttcatacatattcattgtttggaagaaattaagcagacagtattctaaagtcaatactgagtctgctaatgaaaatggttaagttaattaactaaatggcaaccttcactgaacttattcaaagctatttcccctcatgatgtgttttcctgaagaaatgatgcataaaaactaaacccctgttattcgctattcttctgtatcagcctctaaattgtcactttacatgttacaacctgttgcatgatgattaattatgacaatttaatggcatgtaaagggtaaaaccctaaaggattactcaaaccatcattccttaagaaaagaaattgtaatgcctaggttatcttctagggtttttatggttttaggtctaacgtttaagtctttaatccatcttgaattgatttttgtataaggtgtaaggaagggatccagtttcagctttctacgtatggctagccaattttcccagcaccgtttattaaatagggaatcctttccccattgcttgtttttctcaggtttgtcaaagatcagatagttgtagatatgcggcgttacttctgagggctctgttctgttccattgatctatatctctgttttggtaccagtaccatgctgttttggttactgtagccttgtagtatagtttgaagtcaggtagtgtgatgcctccagctttgttcttttggctcaggattgacttggcgatgcgggctcttttttggttccatatgaactttaaagtagttttttccaattctgtgaagaaaggcattggtagcttgatggggatggcattgaatctgtaaattaccttgggcagtatgaccattttcacgatattgattcttcctacccatgagcatggaatgttcttccatttgtttgtatcctcttttatttccttgagcagtggtttgtagttctccttgaagaggtccttcacatcccttgtaagttggattcctaggcattttattctcttgaggcattaccattcaggacataggcatgggcaaggacttcatgtctaaaacaccaaaaccaatggcaacaaaagccaaaattgacaaatgggatctaattaaactaaggagcttctgcacagcaaaagaaactaccatcagagtgaacaggcaacctacaaaatgggagaaaattttcgcaacctactcatctgataaagggctaatatccagaatctacaatgaactccaacaaatttacaagaaaaaaacaaacaaccccatcaaaaagtgggcgaaggacatgaacagacacttctcaaaagaagacatttatgcagccaaaaaacacatgaaaaaatgctcaccatcactggccatcagagaaatgcaaatcaaaaccacaatgagataccatctcacaccagttagaatggcaatcattaaaaagtcaggaaacaacaggtgctggagaggatgtggagaaataggaacacttttacactgttggtgggactgtaaactagttcaaccattgtggaagtcggtgtggcgattcctcagggatctagaactagaaataccatttgacccagccatcccattactgggtatatacccaaaggactataaatcatgctgctataaagacacatgcacacgtatgtttattgcggcgctattcacaatagcaaagacttggaaccaacccaaatgtccaacaatgatagactggattaagaaaatgtggcacatatacaccatgcaatactatgcagccataaaaaaggatgagttcatgtcctttgtaggcacatgggtgaaattggaaatcatcgttctcagtaaactgtcgcaagaacaaaaaaccaaacaccgcatgttctcactcataggtgggaattgaacaatgagaacacatggacacaggaaggggaacatcacactctggggactgttgtggggtgggggaaggggggagggatagcattgggagatatacccaatgctagatgacaagttagtgggtgcagcgcgccagcatggcacatgtatacatatgtaactaacctgcacaatgtgcacatgtaccctaaaacttaaagtacaataataaaagaaaaaaaaaagaaaaaagcaaagaaattgtaaaatgttgttctatcagaaactcggctaattatttttaaattttagatcaaaaactcaactagttttaatgtactacttataagtcagataaaatcattttttatttttgttttctttttgtttttacatctgttagaaacgatggggtcttcaaagtaaaagaagagatttgcaatgcctataccaaattagttattttaggatactgaatgaaatggttttctatactcaataaaggtaaaagaataagcagaggtagatctggttttctgaaacttgaagcacattctaatttggcagttttctttaagtcaaagaatataacaggacaaatataaaattaggtatgaacatgattatagaaagaaaggaaatcataacaaattatacgtttttaaaaagatgacagataaccacatacatcacaaaaattgaaaaaaataagcagaatgttttcttaataatgaaccatctctgcaatactagaatatacagtgtctgaaataattttttctatctttctggatgcatcctctttcagcacctcttcatgtgagagcatcagaaaataatttactctttcccccagcattgttgattaaaatttgacttctatcattgatagtttagaaaagtttattttacattttcaacttattattggtgatgtcacataaattattacaatttattgtccaatttaggaagaccctgccaagtttctttcacatatgaactgtaaaatttaaaagatcattcaagttatcttgtacaataactaatacatatttttcttttagtcatactaaaccctgatgctaaggatcacccaaactttttcagggaaagaagtagcttgcaaataaatcaaggaccatttatccttactttttggaagaaatggaaaaggataaagtgttagtttaaatacactcaagaacagaatgtaagacaagaaattggaagcagagaagttcatcctcaaatgtaagagtgaaagaatagggttaatgaaacaggaaaggggaaatccaagaaaaattatgccgcgctttagagaatctcctaagcacagagatattggcaatgtgcagatgaaatagctgtcacaggtcagccatgtcagaggtgattccagccactaagtatctactgcagattagatatttggaaagcagaatgagctctgttcatgccattactggggcttgacttcttaatggtttcaagtccccctttgactctaatccttctaaagtcaactttgtataaactcttttcaaaagtgtttatccctgtagaataagttcaaaactccatgtcatggcacacaaaactcttcaaatcatattcagctggtattgttttcttccacattccagtcataactaggatcccaagaattagcaaataaaaatatgaaacatccagaattctaagcataactatgtcccaaatactacaacaaaaaatactgaaaagtatcgattgcttatacaaaatgtaaatggtatcctgtattttataaggcaaccctagtcataagatctctttcttcttcctcacacactgtcaagcttgagccaacagagtaccttttaatgggctgcgcagaatagctttcgatagtttacccattaattaacagaaaattcaaatgagatatcctctgtgaaatcatccttctctcctgcctcctgtctctccattctttctccaggagacagaggccctccagactccatgactttgtagtgtattgtgtctgtctttattagagtattcatcacttggtaattgaattctgtgtttaaatacattttttttcttccagaataagtgttcatagaagggagggatgatttacctagcatactgcctggcatataaaaggccctaaataatttttcttttaaccagtaaccaactaaccaattcaacagttttttaaatgagtgaaaccactttttaaatttttttttaaattcatgcttcacctgtaaaaatatatagatgaattgcaatctggaactctgagtaatttatataaaagtgatgaaaaagaccatggcttcagatttgttgttttaattccagcttcagttcatacaaacattacaaagtcgcagtatctactgtgtaaaaagtttcatcccaatgaagaaattaaaatgtctgtctaatagagatgctctaatggacagcgatgtgtagacttcagaagaatctcctcacacagccttggaggcataagttgggaacagagcaagttctgtgtttgcctttcaaaggaatgttcctttccctttcattgacaaatattataaagatgccccaaaacttctgtgagtttcccccgggacgtaaggtcctctgcattttcctaacttgtttctcaaagcggtggttcccaaggcctgagaatagctgtgtctcagctctctcctggaaaccagagcctaaaatgttgccacatcatcgggaatgtagctgcatacttagccagagccaagagatgagccccactcgcaaagcccatgggctggacaaaattgttagccatttggtgtaggtcattgcactaggtccattacacaggttatctggcaggagtcccggctttggaggaaagacgtttaaatcctgtaaataaatggctggaacaccatggcagttgattgtgttaagccctcatccaaaattgctttgttaggttctattctattgctcattatcttgctgtgaagaaaattaagcttacatctgcttagggtgacagggtatcctgttgtcacaggattttccacattttaggcctatgtcacaagctcccaataaaccctcagagaagatcttttgtgttcacaggcatccaggtgtcaggcagacacagtctttgtcttcttgaagctcagtgacacgttcagggctgtgtatactcctccattccctgccagagacaaaatgtttgtggaacagtcaagctagaagggacctcagaattaatctgatcaaatgtctgcatttttcagttccaaggatactcagggaaggccctcggattctataagtagcggtagaggtggtattagaagtcaggttgcctgacttccaaacctctgttagttactgtcccttcccctgcatgcagcactagtgtaatccctcaactctcacttccctttttcgccacatgcctctctctctttccttcccttgattaccctgcctatccctcctacaagggaaactaccaccaggcatcctcatctgagacccgggaatggaggccaggtcttttccctccctccctccctttcccctttttttgtgtgacagtaacattattcaagtacagctcttccttttttcagtaccttccccctcagaccagaagttaatgaaaaatagggttgcgtgatatgcagcctgggggccaaaaatgtaggacaagcagtgtgcttcagacaaaactgtagggttctggtttcatgcacaaccttggaggacggtggctagaggccctagtatgagagatcaattaaacatggaggccagaaattaaccacatgggattaacatacgtaaggttgcttcttttcaatgagtctaggaaacacactggggacaccttgttcaagacaagctactatttgatgctccttcatacgcttgcttaaaatatttgttcagcatttatttagtgggggcaagaaaaattgatgttatgttaataagaaaacctctttacctcttaccttttattaaaataatcaacttagaagatatactaaaactcacatgacttttgacatctatggatgatctttcatttaatatttttctgctattcctactatagaataaaagctgctattgcattattacagagcgtaatgtgagccacatatgttattttaatcttaatggccacattaaaatagtaaaaataaacaggtgaaatttatttggattatatgttttatttaacccagtgtatctaaaattgtatcattttgacgttgcaatcagtgcaaaaatacagtcatgctatgtgtaatgaggttttggtccatgataaactatatatacactggtgatctaataggattataatacagtaggtttaccatacctttttctatgtttaggtatgtttagatgcacgagtacttgccactatgttagaatttcctgtagtattcagtacagtcacgtgctgcacaaatttgcagcccaggagcattaggctatatcatgtagcctaggtgtgtagtaggctatatgtaccacctaggtttgtgtaggtacacactatgatgtttgcataaggataaaatcacctaatgacacatctctcagaatgtattcctgtcattaagtgatgcatggatgaattaaaatattttggattctttttttttttcagtactatgccttcggaatccaatatgtattttacagcatatgtctattccaaataggcatattctgggctgggtgctcaatagctacatgtggttagtggctaccatattaaccggtgaagttctatgcccatcaaggctacacgtaatttacagggtataatagtattttaaaaattaatttttttctggcttttatgttgacatatcgtttccattttttaaatttttgttttattttctttcactgctttggaaacgcacaacttcttggaatgcaaattaaaagatatcaaataatgatgtagataatttgttattgctaaatgtctaccacttgaaatattcaagtttcaaatttcagctaactgcgattgcaagcttcagctagctggtcccagatggatggcccagctaaatcagacatttgtacatactggctacaaagtgtcccaaaaacagaccaggagggtcgtggatttaaaaaaatttccaccaaaggatgctgtcttgtccattttccaatttgggtaaattaatggatactgcatttaaaagtttttttatttctcgtacattgaagccctgtactgcactcaccaactcacccgttaaagcggctctgaaatacaggcaggaccaagacttagatggactggaggttgggccacaactccttgaacacctagagcagaggtcagcaaactttctataacggtccagatggtaaatgttttaggctttgcaggccaataggtctctgccacgactacttaacaccgctattgtggatcaaaagcagccctaatacgtaactacacataaacgaatgggcatggctgtgtcccgtgacaatttacttggggacacaaatttgaatttcatataatattcatgtctcacccatttattaattattttcagtttcttcaaatgttaaaacaattgttagttctcaaactgtacaaagacatatggtggctgaatgtgacccataagccatagtttgctgccctctgcccaagtctcctgttgaaatggggttatggcaacaatcctcgcagaatataaaactattttggcacctgacttttgccctgatttttttattgtttccagagaaatcaagtatttttctttttcaaatttatatccatattctctttttttctttgctctcttctcttctggccagcaggaagagaccaacccatctttgaattgtattcactttcctcataccgtcacacagctagtaaagctacaacttcacatatgccaatgccaactcttcccgatgttgtgttcaaaacctttctaagcatcaccattcccaggagtagcaattctatatgatattattattttacttgttggtaaggttaaaagttccagggatactgattttcttctttgttagccatgtttcattgagtggataagcaatatgcatttgcttcatagtataaataacaataatgcatcaaattgcaacaatatgaatattacacatagaaaagataaatgtgagttatgtaggtcatgccatttgatagaaaattttttttatatttatatgtttaaacatgacaataaaatgattccattcagatgaaggcaaaggaataggatttcttttcagtgtggtggttttctatttttgttttgttttgttttgttttttagagaatgagttttggagaaaaacaagctttctagacagaaaatattgaaattaaaaccagcaattcatggtcatattattgaaactatcaaattggtatatatatttgaacactactgattattttctaaaatgttacgctttcaaaaaatcatgaagattggcaagttttttagatgcataagcaaatagtgtagtacggcttgtaacactgttcaagataacttttttataatgagtatggtctttctctgccctgtctaatacaatgtgggttttgagcattggaaatgtggtaagtgcaactaaggaactgatatttaaattgtatttaagtttaatacatttaaatttaaagttacattttgataaattgctttgtttttcttttttctttctttctttcttcttctttttttttttgttttgttttttttgaaacaacaatctcactatgttgcctcccaggctggtatccaactcctgggctcaagcagtcctccttcctcggcctcccaaagtgctaggattataggcaggcaccaccatccccagctaaattgtttcttaaatgaaacttctgaatttgaggatacgtgattatgtggtgtagttttccctttctttccccccctgaaatccatattctgaagtacagtgatttatataaaagtaaaaagaaggagactgttttttttttttaaattctattaagaaaccaaattttaacagacacctcagggcctaaataaatatcaagttattgttatttgttatggttcttgttgcttgggtaaaactgtacagatcatgacttagttttccttgaatttttatcaaacaaatgaacaaaatgagcaaacaaaaatattaaaaatgatatttcctacgaatccaagggacatttttctgtatcagccaggctgatgctaaggtccttcaagcaaataagatcaaagatttctgattggagagtgtgggaataaagtagcccttgtttagtgctactttgtagagcctttgtttagagtacggctgggagggagggagagagggagaaaaatacggggttaatttgtaacaacacattctgtggtgtgcgtgtgtgtgtgtgtgtgtgtgtgtgtgtgtgtgtgagagagagagagagagagagagagagacagagagagagattaaattacatttaacttctttaaattttattgtcctcagggtttaaacagtatgtgaccaaaatcacattatttagtgaagagtttgtgggtaggtggatagttagatgggtataaatccctataaaatccattttagaactattgaggtttgagcaaatcaatgtcacctattcacttcatttgtctaatgcctccaggagccattaaagggcttgttacctaactttagggtaggtttagatcaaggtgaacagtcagaaaatattatccatgtactcacgtatattattaagtattctttgaccatggagttagatgcttatactgcaaacaaataaattaatgaataacagtgctgctcatgaacaccaaagtttactgaaaagtcaatatggttttagtgtggtaataagggcagagttctccaaggactgccaacctatttattgtacatcaaattttactgactttgaaatcttgctagaaatgttcatttacctcgtaatgtattatatgtttgaggtcttgagaaaaataacaaaatccatgtgtggtaatgaagtggttatgcaataaaactaacatacactgtgatttgacacaggggacttcactgttatcagatacttaaaactggaaacaatgtaggaaatatagatgtataagcatcgtaagtaaaatccacatgctttaaaaaggaaatccacttacttttaaagtaatattccgagagctatgccactgggggctgaatgtcataaaaatgatttgtaattagtcacttttacattgtatatggatttatagttttaaaatatctggtggcatataaccacaatgtatttttcagtcatatattcatcattattttattaaatttccagagggaaagaaaataaatgacctcctagtgagggatattttaccacgagaccagttgtaaaaataatcgagttttgtgcctgggaagatatctttgctaagtctagttctccagtgacattaatttattgttgttaagaaatgtgtgaggcaaaatgaactctccaaatatttcatactacgtgcattttatccaaaagaagataatggtttacatgaattatttaattggtattactaatttgggggaggtgatttttggttgggggcaacagaatatttgcctaaaatgcattcagagtgcgctgttatttagctattttcaaggtagagggatattggcattggagacttacacgtagccatacaatggccaacttcagtcaactacagaagcaatacagggcagcggctggaacaaaatagctactaggtaaatattgattgaattaattacacggatattaccactagtcctgcaattaattaatacctagccctgtctccagccccagaatccatgacatcaagctaactaacagaaaacatatcaagaattttattccttagtcctcttgactgaccctcaagagggtctaccctcttctactctgtattcctcacatcaaatttcactagtccagccgccaagtaacacctgttctgactgtgctagtgaacttggatattcacacatagcctaaaatgggaaacagagttggaaatgtcatgtataaggacataagcgttttcaaagtgtacaagaacataagcgtttttaggagatttaccttctcttttctgttttattagcgaatgattgattgttttgtatgattgttcatttaacaaatgctatatcatgtaagaaaagttactaacggtatataaagatgtaaaattcaattgtggctgtgtgtatgtgtgagtattctagcttttggggagagacaagagaagaaagaagacataagttggaagagaacagtaaaataaagaaaaaagtaataactgacggtgtctaatgaagtagcccaggtaattaatgctagagtttattagatagaatcattatttccttccagagggattaagcaatcttctctgaggaggtggaacttttattacccaaaacatgaaggattgggaagagttttatatgtgtcgataaggaaaagagatattttattgagggaaaagaagacattttaatggcagagtacacaatgtcagaggaacagaccaaaagaagtgctttgttattaggaagatttgaagaatggaagatagcgtcagattgttaagaaccattttttagataaaggcaggctaaagaagttggaggctattggaaatcagtcacacaattttaagcaagagaatcaatgagtggcagttttgaaaactgaatttgatagtggcaaggaaaatagggctctatcatcccacttactttcaaagttatgaagaaattgtagtaagctccagtcagtacctaaaggaatttattttgtgaaattgtgtaaacaaaaagcaaaccttcttttgcactcatatagtatattttctcaaagtcatatagctaaagggaatgagaggtaaaatagtacagtggttaacaggataggcttcaaagcctaacttcttgggttcaaatcctagcttggttaccatttcacagctatctgaccttgtacaagtcacatgcgtacactgggaacaataatactacctgtattatagagttgttattagatgttgttgatagatatgttgggcacattttaggcactacatacataaacctctttctatagaagtatacatgtgtacctatatttaaaataatgattttcttttttaaaagaagcacatattcattgcagaaaatttttttgaaattttaaaagtaaaatctctggtctaagtgcactaaaatgttttagactttagatatgaactacaaaaacctacctcatcgacacccaaccccactcccagagatatttcattttatttgcttgctatcagtaatgagaagacccaattcaccacacaatttctgttgtatgagactattgtattgcagtgcaagatagtgttttaaatctttgttaaatcaataggtgcaatattacacctccctgtttgaattttcctagtgaagtcaaacaattttaataggcctatacataggtcagttatagttctttcctaaatggtctattcctcattatcctttttaattgagtatttgtctttttttctactgatttgtgagaatgtttttatcttaagagtgtcaaaaagatgaattgtttttgcctttttctttggcttgtttgattttttatgtaaagaaattttatactgctatgaatgtaagtcattactttatggcttttaaattaaaattataagaatagcctcccatattttcattacttttatagttcaatttttttacatgtaacatttcattcatctggtatttagttaggaattgtgtgagataggattttaaaattaagttaaaattcaatcaagtctttattttttaagtacagaagtttccgaattcagcatttacattaaattttttgaaaataatgctaaaatatcatgtaaattattacttattggaattgaaaattccctattattatttttaatctttataacaacttatgttatctatgcttctattataaaataaatgacaagccaaccaaaatagagaagatgcttatcacaattatatcatgataatttaaacatgattttggattaatcataatccaaaaatgcatttgataagcattctaactgttcttctagtccccataaaattaacaaatggcaaacagtaatgttttaattttcaaaatattcatattaatattcattttcaaaatatgtttacttgcatgcatttcatttatattatttcttattgaagttgacttctcaatgtatattgctttaatgatactaagtattaagggtatagattgtactcacacaaataactattgaaaagcataagtttaaatagatccatttatcaaatgatgtctttttttttcttttttttttttttttttttttttttgtgagacggagtctcgctctgtcgcccaggcaggagtgcagtggcgcgatctcggctcactgcaaactccacctcctaagttcacaccattctcctgcctcagcctccagagtagctgggactacaggtgcccaccaccatgcccggctaattttttgtatttttagtagagacggggtttcaccgtgttagccaggatggtctcgatctcctgaccttatgatccgcccgcctcggcctccccaaagtgctgggattacaggcgtgagccaccgcgcccggcccagatgatgtcaattttgaaagatactggaaagtatgttttgggagggaagagggaaggaaagagtagaatatgaagtcagtaaaacctggatatttagtgccatctttgttacttactagtaaccttatgaatattatttatattgttgatccttaatatcctcacttgataattttagaaaatgttatgtacttcataggatcatgggtagaataagaaagtgaatataagtaaaatccatcatgaagtacctgaaatatgttgtaaacctaagttataatagtaattttattgttgctaatatttcagaggaatagccaccaaaccagtactacttattatttatttctatttaacatataaaacatataatattctttctgagtggtaactttgaaaagggacaaaaatattaaaaattacattaaaatcatgtataatttataatactcctttcaaggttactaaagtgtgcatgtatttctaatcattcacaaatatgaaaatctatgtgtaaatttttaaattttctaaaaaattgacaaataaaaattgtattattgtcatggtgtacaatgtgatattgtgaaatatcacatattgtgaaataaacattgcggaatgactaaatcaagctatagaacatattcattaccttacatacttattattttttgtggtaagaacacttaaaatctacttttagtaatttccaagtatacgttattgttactaacagtagtcaccctgagttacaacagataactaggatttattcctcctgtcaaactgaaattgtgtatcttttcatcaatatctcccaaatcaccccacccccaggatctaataaccaccatttttctctgtttctctgagtttgacatttttagatttcacatataagtgaaatcatacagtatttgcctttctttgcctagcttatttcacttgacatcatgtcttccagttcaatccgtgttgttgcaaatgacaggatttctttctttcctaaggctgaatagagttccattgtgtttatataccgcaatttctttaaccgttcatttattgatggacatttaggttgattccatatcttggctattgcaaatagtgccgcagtaaacatgagagggcagatatctcttcaaaatactgatttcagttcttttggatatatgcccagagataagattgctaaatcatatggtagttctatttttaatgttttgtggatcttccatactgttttccacaataattatactaatttacattcccatcaacattgtacaagggttctcttttctccacattctggccaacacttttcttttgtctttttgataatagtcattctaacaggtataagatgatatcttattttggctttgatttgcatttccctgctgattagtgaggttgatcatttttttttttcatatgcttgttagccatttgtatgtttgctttagagaaatatctattcatgtcctttgctgtgtgtcgatactgatatgtaaaatatgcatacaaaatcaaaaccataatttatttttaatatatttttaatatgtcattaatatttttcagtgtaataggatgtttttcataatatttactttaatggacgcaacatatttcattatgtaaaagcagtttattctatttggggagatttcgtttcactttttcgccagagtgacataattgaacattcttgtcataggtctctgtgtttatctctgatattcccctaggaaaattcatagaagtagcattttggagttgaagggaatgagtaatcttaaggcttttaaagtagttttatcaaattttctaaactgaagtataaagacacatagaaaagtacacaaatcataagaatagaaattcagggatttttaaaaaaaacttagtgtatccatgctactaccaccaagttcaagaattagaacattacctcaggagcccctctcatgttccctcccagttatgagcctctcccctgccaccaccctctcccaaagataagcactcttttgacttctaacacctagattagttttgactttgaaattactataaacagaatcatccagtatatgcccttgtatttgacatgtcctgctcaacattatttttgtgatattattctatgctattgcctgtgccatagttagtttagtttttctatgtatggtattctattgtgtgaatatgccacagtttatccattctgctaatcaatggacattgggctgtgtctattatggggctattaggaaaaatgctggtgtgatgttcctgtcctttgctgcatatatgtatatatttatttttaatatacgtggaagtacaatggctaggtcataagatgtgtacatttggctttggaatcaccaaaaaacagtttttcagtgtggtcatttcagttcattttcaccagcagtatataagacttctagttgatccacatattcatcaagagtatgtattttcaacctttatccttttaaccatttaggtgaatgtgaaatggtatttcattgtgttttaatttgcaatcacctgacgattagtgccatttttatatcctcttatgtgaagtcattatgcaaatcttttgcccattaaaaataatagttgtctttttcttactgatgtagaagttatttggatacaagtcctttgtcagatctatgcattgcgaatatctttttccaacctaaactttgctttatttttttctcttaacaatctttcctgataaatggagtttgatttatcagtcttttcctttatggctaatgctttttatgtcttgtttaaaaaataatacattaacctaaaattgttgagatttttttctatattttcttttgaaaactttatttttttgccttttacattgaggtctgcaaacaatctagaatttatgttttgtgtatgatgtggagagtcaaggttcatgtttttcaaatgactaatcagttaacttggtgctatttactgaaaagatcatccttttccaacttaagtgacaccatcgtataaattaggaaacgctatatagatgatttgttctcacttcaatcccacacaggcttaattataataaatattcatgtctggtggcaaacattcttaaacttcgtcgttcttcaaagttgccttggatattcttagccctttgcacttacatataaatcttaggattggcatgtcaatttctactaagaaatggttgctgcaattttgattgagattgcattgaatttatagattatttgaagagagggcagatatctttacagtattggactttctaattcatgaagaaggtagtcctctatttgtttacattttcttcactgtctcagtagtgtttgtagtttccagggtagaagcttaacttttcggtctgaattaccaaattactagcaacatatatagtcatgcatttcttaacaaatgagatatgttctgaaaaatgtgtcattaggtgattttgttgttgtataatcatagagtgtacttacacaaagatagatggtatagcctactgcacatccaggctatatggtacagcatattgctcctaggctacaaacctgtactgcatgtgactttactgaatactgtagtcaattgtcacacaacaatatttgtgtatctagacacagaaaatgtaccgtaaaaatacagtatacaaatgataaaaaatagtacagctgcatacggtatttaccatgaatggagcttgcaggactcaaagttgctctgggtgagtcggtgagtgagtggtagtggtgagcaaatgtgaaatctaagacattattgtacggtaccatacagtttacaaacactgtatagttaggctgcactaaatttatgaggacacatttttatcttttttttttttttttgtatttttagtagagatggggtttcaccgtgttagccaggatggtcccgatctcctgaccttgtgatccacccgcctcggcctcccaaagtgctgggattacaggcgtgagccaccgcgcctggcccatttattttcattaatgataagttaaccttagcttatagtaacttttttactttataaactttttttttaagtttttgactctgtaataacacttagcttaaaacatgaacacgttgaacacccgtacaaaaatattttatatccttattgtagcagctttcttatttttaatatttttgctgtttaagcttttctgttaaaaagtaaaacacaaacacgcacatgagcctaggcctacatgggtcaggatcatcaatatcactgtcttccacttccacatgctgtcccccactggaaggtcttcatgggcaatgaaacattcatgaaactatcatctcataggataacaatgccttcttttgaactaattaagaatatagtaaatacataaaccaataacagttgtttattatcattatcaagtattgcatactgtacatacttgtctgtgctgtatttttatataactggcagtgcagtaggtttgcttacaccagcatcaccacaaacgtgagagtaattcattgcactgtgacatcactaggtaataggaatttttcagctccattgtaatctcataggatcacagtcagtctgttgactgaaatgtggtgaatgactgtataatagggctccaaggaagatcataaaattgcttgttttccagaactttgacaaagaccttttacagaaactaatataatagataaataatagtataacattgctgttttcctttgcatttcattgattactaactgtctggattttttcttgtttattggctgtttacatttttgtcaatttctttttatgttctttatccagttttccagtagatttttcctttttttactcattaaaagatttttttatatgctaaaattattaccctgtgtctgatatatgctgcaaatattcccagttgtcatttgttttaattttgattagtggctttaatttataagtgaatacgcatattatattcaatctttttatattctttttttgcttctaaaaggcttccccacgccaatattttattccagttcttcttactatttttatgcttaacactttaatttttctaaaatgttttgtgttatgaaatccatcttaatatgtttatttctaaaacagacacttttgcttatcttaatattaaaacatatacatttgaaattaacattcagagattgaaagaataaggaaagtaatcttgtgtgaaattaggtcaagatgtgcttagatactaaattaacacataagggaattgaatgtgtttgttttctttcaccacagggaacatgttatatgaagagcatggttttataatacataaaaggattattagaaaaatgatgtattttaccggtcaggtgtttgtgtctatactttgatgtgaatgcaaaatagtaaatataaatgtaaattaatttaaaacacatagaatctgatacaaaccttaatctttttccacgttatacattactcacacctgttatatttttccgtgaagtatttggaatactctcgattcctggaaactgttttaaagtgcagaagagcacaaaaaaaatatgtgttaaaagttcttgatttccacccaaccattaagtgatattgccaaagaaaactcttcagagcatttttcactgatggctttagatatgttataccagaataataatgattcattattaaaatatgcaaagtgtaatttctcaacaacattttgtggtaggaagatgagctggtacagtagttttccttattaaataattttttacaaaagtaattgacatggtttggctgtgtccccacccaaatctcaccttgaattatggtaatccccacatgtcaagggtggagccaggtgcagataattgaatcatggaagaggatcccccatactgttctcctgataatcagtaagtttcacaagatctgatagttttataaatgtgagttcccctgagcaagctctcttccctgctgccatgtagaatgtgtttttgcttctcctttgccttctgccatgattgtgaggcccccccccgccatgtagaatggtgagtccattaaacctctttcctttataaatcacccagtctcagatatgtctttgttaacagtgtgagagcagactaatacagtaatgcatttacattgttcaaaatataaaaggtacagtaaaaaatatctcaccctacccatcatctgctctaccctcactgcacattaaccttaattctagaaacaaatctacaaaataaattcctgggaataaaatttccaggtcaaagtttacatgctttttatagatatggccaaactgccttccacaagaggtacacaaatgtatacttcccaccagccacgtagaagagtctgcattttcccacagccttggcagcatagtgtacctgcagacttgaatttttgccagtgcaatagatgaagctctaattttcatttctctcattattaccaaggctaagcttctgttcatgcttttaaaatcctttgtattttcttttctgtgaactgtccttatcttttgtccaattttcttttgggttgttggcctttttcttattactttgcagaaggtctttcatgtgttaggaaaattagtcccttagacatgagtcacaagcatttatttttcataattgttcatttgtttttgattttgcctatggctcttttggtcgtgcagaagcttttgattttttatatagtccagtttactgatatttttgtctgttaattaaagttatttaacttgaggatacaatttacatttttttgtggttgactactatagacatatactgcttcttacattgaaaaaataataatcctgaatttggaaattgtttttaacaaacttttggtgaaggtccatcatatttaggaacagagcttgtttgacccagaaatcaaaggtcagtgagaaggagcaatgtaaatagaaagttaaatagcatgaggtaaatgttatgatggtgggaaagacaagatctgagaggataaacctaaagcaacatcataattaagctgaaaatttcgtctcatgataagctatcatttcattattccagatattagtcaaatctgacccattacactgttttctgtcaggaattgttttacctctattacaaggaagggatagtatgggaggatgataaggaaaccagcagtcttagttaaatgttatacagatttctgtgcttatatatgaagcctaaatgaaacgtgaacaatttcatgatcagataaaaaggagttcatcgctcagttttagagattttaggaaaatatgatggctattatctcagtagcttcagagtctagaggcatttagatgttgttagttgaagctgtaaaacgctttttacatctacttgtgagtagaaaatgatccaataaaaataaaatgtttagttacctcctttaaaatgcttgaaaaataagttgaggacatcattagatcatgtattacagacgtaggagtatatttgtaacatcacctacatcacacatacctgtgtgcgcgcgtgcgtgcacacacacacacacacacacacacacaagagttcagcaccacaggtgtagttatggatgtgaactcacaaaacacaaatcaagcaaagagaacaatatctcaattcatgattcatggacattctgtgctatctgaaacacaatgcttcttttgcccaactctcacccacacagggaaaggctgccaggaatgagaggcaagaagtgtgcaggtcaccttcaacaggagccaccacctgtatttcccatcagtcttttacaccattgtagtcacgtggatccaaggactgtattccaactgacagctcctgcgatgaggtgcagttccacacgacaaagccaggcccaacatttcccattcatcttaaagttagtgtttccaaggaaacagtgctgtgggagcctagggtcagtcccagactgacctgcaacagcccaggctggatgttaatcctttgcttatacagtctcatgaatttttcacaacatatatacatgcatttacaagacgtttcactgtacatattgtttacgtatacaatcttgtttaaaattcatttttctgtacattaattgatttttttctcgacaactttctctttttcatctcctaactcttgcatccaattaaacaatgtactgttcattagtgacttattttaaaagtatctaaaacaattgttccaaagcatgtgacattgtttatgtgacacactggtatattatctagtttatttttaaaatcttctctattattattcataatatattattatggaacagatgtatattataaaattttattcatattgcagtgtaatattttgtattacagtggtattgttaatagtctcgtaaagagctatcattacaagtttaaattctttattctgggatgccagttttaactcttgatattctgaagaaaatagctttactcttgtttattctggctctgtttttttgttttgttttgttttgttttttgttttttttgttttttttttgtagagatgggagtgttgctatgttgtccaggctggcctcgaactcctgggctcaagcaatcctcctgcctcagcctcccaaagtgctgggattacaggcaagagctacagtgctcagcctatcctggctctttatttacatgtaagcttgagcaataatcactgctacttaataactttattgtcattcattatcatgcagagtattgctctaaggtatgttcagggatgacgttactgagtcctaacagtaatcctatgaagcaggtgctatcattgtccccaatctacagaggaggcattgagagttagagaaaacttggctaaaatgttaggcaagaactagaaccagaattgaaatccaagtggcctaactctagacctcacaatgcttaataccatgtcatgctgcttcctaacctatttaatgtttttttcaaccccaacgtcatcacccatgtgtgatagtgggatcataataatatctatgtcgtagcattgttggatggattaaggaagtctacaaatgtgaaacttccaaggatgatggttggcatatactgatctcttaataaaaataacctataatcattctgttacagtctactctaatccaaatgttctttttacttctcatctcaaccacctgcttctgtttactaggactcacaaactatagctcacaaaaacgcataacttaccaattttccttgtacatgaagggacttccttttacaatcttccatgacataaaagaaagctagaagcaagtatagtagaagaaatgattgctatacaaacaaaattatagttggtttggttttaattttaggatgcgcattgaataaaaatcactcatttgggatttagaagacctgtgttatatatctggtgctaatgctgaataacttggcttattcatttttataactgcaaaggaagcgcgtatggcatataatacacaacacaccagtatatttagtaactgagtgaataaatgaaagatgtatttctttactttatcagttgcagttggctatgcctttgtgtaaggtgtgtgttttgaaattccaaaaaggtattagtttctttaaagcaaagaatttttgtagcaggttaatgaataattttgaatacattggttaaatcccaacatgtaatatatgtaaataatcaatattatgctgctaaaataacacaaatcagtaagattctgtaatatttcatgataaataacttttgaaaatatatttttaaacattttggcttatgccttgagaattatttacctttttaaaatgtattttcctttcaggtttccagagctttacctgagaaacaaggagaaattgaagctcaaataaaagaccttgggcagcttgaaaaaaagcttgaagaccttgaagagcagttaaatcatctgctgctgtggttatctcctattaggaatcagttggaaatttataaccaaccaaaccaagaaggaccatttgacgttaaggtagggaactttttgctttaaatatttttgtcttttttaagaaaaatggcaatatcactgaattttctcatttggtatcattattaaagacaaaatattacttgttaaagtgtggtaaggaagactttattcaggataaccacaataggcacagggaccactgcaatggagtattacaggaggttggatagagagagattgggctcaactctaaatacagcacagtggaagtaggaatttatagccaaggagcagtgtaggagtcagtagatggaaaattattaagaggaaacatcaggggtaagtgggattctggctaaaccaacctcacaggattcttgctgaagataggccagggttatcttatcagacaacccttggggaatggtggagaatactgagggtgatcaggtaccaaggataaagggttcttgtaaaactgacaggcttctttgctgaacctggattttacaggggagtgcaaagatgagcccaggcgaaggttcagaagcctgactaaagtttagtcaagcagggaatctttgtcatcatcatcattgttgtcataatgataataattattattattttactagaatatgttgctttttcctcagcatttactagaaataaggtcttcattaaacttatgttactagaatgcctgcatcatatttgttactgtgattcattttctatccctgttttaattgtgcttaatacatattcatagattccttatccaaaattgaagttgtttatgagattaggttcctaaaatataatgtctgggctcttttgtagacattgtaaagccctctcagactgactacactttacctttctatcttctcattctgccagcaatctccccgtatagtctggccacatcaaattacctggtacctttccatccatgtaatttcatgtcatacctgtgatcttggttttctctcttctttaaatgacttctttcagtttattttgatataatgaattttcttccattctttaagaatgaattcaaagtcattgcgtcttccaagttttcttccgtaccccaagtagagttagaatccctgttaggatttcttataaacctttttattcatctcccattgttcatatgttgatttacacttaaattttatacacctgagtatttcattacacatctgcactgttctttgagtgcagagggcattctcttatttatctctgcttctccactcatatcatacacactcagcctaggatccagtaaatgatgcttacttgtgagtgtttttaagtcaatgaataaagacagtaccaagacacccagaatacgaatgagatactgcaggtaagcgtaaggcttcagacaatcctgccaattgaacaccactatctccttcttctagtgtccttgtaaatgctgattgatcttcttttctccctttcaaggaatctattccaaagattctttcaatatgctgccccgttttgcgtctccttatttgccaaaatctttaagtagccaatcaaataaaccgaatcgttgaaattacaatctattaatgaatgtattgttgggcaacttcagagtaaaaaggataagtaacatttttgagtagttttttcttttatttaattgactttaattgttaaatttatttactgtccagtattgtaaaaacctaacattttaatctccatttagctgttgttttgctggaactgagagcaaagggaaaaggaagtttgagaatattctagtgaagaggaagtaaaagtttcgggaagatgggcatgagtaacaaggagatagagggaagtttgctacaactaaaatgagttagattagcaaaatgttctcgactatgtttaccttacttcctcctgacacttatgtctaccattctgatagctactcctcaagagcagatggcactgtggaagtcacaagtagacatcatttcactagcacaaaactcagcctgctcagccagtggcacagtcttgggttcagtctgatgattaaatttacgagacataataggctttacccagtaacaaatttagttagctttaagaaattatacaggatgggtaacaacagcctgcacattaaaggcacagtggaagtcttgataccaagacgtggcttctgatgtcccatcaccctgaattttagtcatacatgatcacaaggggcaagactgggtgcgtacaaaacacatcatcgtctcagggaagccatcagttctaggatcctgaccatttctccacttagctagtacatattgtactcagaggtgtttgactagctcctattcaccagtacaattacatctcatgaatactgatttttcactgctcaataaacaaccccaacaagaaagtacagttacttggcccaatacacaataaccttagccaaattctcaattatcttatatccagtatattcttaaaaagtaactggcgtaatattgcgaagaggaaaggtcataaagtctttcctcccaaccagaaatagctttttgtagctcacggtaaaagcacattctactcttttaaatgcaatctttggttaaaatgtgcctctttattataatagtttaaaaaatactcaatgctagctatctctcttcctggaacacatttaagaaaagatttttttttgaatcccttggtacaaatagatcctgtttactcaatcaaaatgacttttgtcccagtctgtgccccccggaatggttttcaaataatgaaaacctgcattgtgtcttcgattgtctatggcccatagggctctgccaaatgggtccctgcagtttgaagtgaaagccatactcggctgtgttaatcacttttctttatcaaagctacaagtcaccactcactgctgtgtgtagtttctgagagtcatgatatttgcctcctgcagcttgttttaaatcactgaggggagagggagctgcttttttcctggcagaaaactccttggcttcagtcctctgagcacattccgagtttcttatctctggagtgcagacttcaaaaatactcttttagcctttttcttctgcttgtggctgtgttcaaggtggggggaggggaaacataaaatcatagatttgatgacttgagagtttctcccaaaaattctcaaacccccagcttataattaggaaatggtgacctgtgtgaataataatttaccttgttttttatccctctttgtctagcttccattcctttcactaataaatgatttattaagattgcacagtttttctgatttaagatataggatattagtccttacagcctgctgtattcctctgcttaaaggaattaaactatttttccattaaagaaagatgggacactagactttgctttacttagtttcaaactactgaacaccaaaaataaaatttttaaggagttttgagcacatgcccttttttttaacacaaggtaaaaaaaaaaaaacacctttactaaaatcttaagaaagagttaatgcaaaggaagtagatatacgaacagccacgcccctagctccaaatcctaaatgtaaagaaacttgccttgtctggccatggtggccatagctgcctcggaaacaaagggtctgaggccttgccattcgggtagtttgttttctctagtcaaactctgagcacacctgttagaaaaatatgtaataccctctctctgtgagcctcagttttgtctgcttggtacttcactcttattgatgaaatgcagctagctgtgtagtgaaacccagataaaaaaaagctttaagggctgtgttctaatacattgtttatgctggagtgaaaattgactgcacattgcttggtttgtgcaatttactcccgaaatattcctattcaggaaatcctgcaaatagcaatattcatcttgaaaatcacctcacagaacccttagcaagctgagaaacataatcaatgagatcgtgatgtagagggtgaaaattaggcgtaatcacagccctttcccatcagtcagcccactagaaggcatgcctttgaattttgattttcaaatatactctcaatttagacataaaatatgttgatttcagatttcagaaatgataattgaatgctaagatcccgggaccagtttagaatttctataaagggtcttatgtttttaacctttaatgaatgctttcaataatgagctagaggtatactatttatctgacataagactgactactgctttccaaactttttattaaaatatgaggtgtggcgggacacataattttatgttaaggcttagtgactgaaatactttcatcttaatcacagggagggggttttttcctcccctcaagaatcactttccttctgtggtttataaataaacatgacatgtggctctgctggctcttccttgcagtataaggagcataattgcccataatgtcaaatccacactaaaaactaccaaaggactcaattgtagtgactgaccattaaagtcactgaacactgtgtgtgttcacattgctgtgagtgttgtcaaagaaaaatagcactagacaacagacaagaaagactgtgttcaaaacttttgcaatagaggagacagattgaactcaattctgctgaaataaaaggcaggagagcctctaagtgctgagatgagttagtgagaaagtactagatatcaggagggaggttagtcaatgtgcttatttaggccatctgtgtttgctgattggcacttatcaaagttagattcctatcctcccaacagaagactagcagattggggcactatcttttttgatgattctatatcaaagtgctagctcccaagtccttgagaaagtttattcctgaggtataaaagtggcaagaggctaggagaatatttttgtctcaaaaaagtagagaaataatatataaagttttctagagtaaatgctctaagaaaaggaaggtcaggtctaaagtcaggaagaaatctgtctcaaatgtagtcaaactcagggtatttttaaagctttctttgtcaaccctccattttgttcaagggaaaccagttttcccattgaaaaacttaggaacgccagttcatctagttcatttcagcaggtttctgttgttgaaggactagctgaacgaactctgacacttggtagtaatcagacatttcatgaaggagatttccatgaaagttagaaggaagacgaagattaatggttgaagcagactgcaaactcagtttttgagtccagagggcagcaagtcaaaaagattcctagaagctgggctgtaggcattctcagatggtagagtgaggatggcagtagcaatccgatggatttcttggagcatggcacggaagaggttggagtttactgaactttttgcatggcctacaaagcagcagctccaggcatgaaagttgtctatacataatttgctgtggtggtgagtcctttgtagtttatagcaagtcatccagcttctgcttgcagggcttctttagatattgtggggaaatggcagctataagacaacctagagaagagagtccttatctcagtaataatatgggcagtcacgttttagttctcagtgtcaccaagtcaggatggtgggagaaaaatttgaaatgttaatttggagaatcgcagccagattgtaaaggaaataaactgaaaattggtaaggacggacaaaatgtgtaagacagcaggatccagatcaatttacaggtaggtaaaaaaaaaaaaaaaaaaatcatgtcgtttacaaagaaatgcaaaatagatcaaagacaatgaacaggactagaatctgataaccccaagggttactgaaactctatctctaccatcacccttttgatcagtgttaatcaaagtaagactttccttgtttataaaataagactggcctatttatttatataggggtagcaaaaatggtaatttaccaaataggctattttaagtgtgattagctggaagttttcatgaagaatcacaagctgaataagtttcagagatatactgtacagcatagtgcctatagttaacgatactgtactgtacaattagaaatttgctgagggcagagtttaagtgttcttaccacaaaatactactactctcttttaggagcagtggtacataaggtgagaggaaacttttggaggtaacgcataggtttatggcatagattgtggtattggttttgtatatatactttatctccaaactcatcaagttctatgcattaaatatgtacagctttctgtttgtcaatcatacctcaataaagtagtttaaaaaatatgaaacctcagatttgattttttaaaagtctccaaagtttaggaaggcaagtcaagaacttgacatcagattttacctgaagtaaaatacctatagattcagctgaagtgttctgttttccaggttcctaaaatacccttggtttcctgggtctcctaagaatagaccttccttactcagttgtaagattgggaattctgtaagccaggtaccgggacagttttcccaaaaggggcttatattagctccatatagtcaagagtagctccttaaaactggtcacatctgactctatgcacttaattctcaaatatgacattccagtcaaagccttggttatatatttttttcaattatgtcttgttacctaaatatatttattgagcctatgcaaataattatattgccatgaaaataagaatactcggtaagaatttctgaattttacagggatcaggcagggataaaaagattaatgtttcattctgtttacaaaagcatactctaaattctcatgagttatagataacttaagagaaaaaggaaaggcgtttcttgtatttagcaaacagaacattaaaacatgaggaatattttaaacaaaagccataatcaaatcttttatcagttcattcaggcccatgtagttaattcttgtcttgcttgatcttgagttagtagtttcatgaactcatcagcttcttcacagagtttcataaatcctgactttgtccaatggtataatctcgaagttatttaagcaatggcatcagaagtctgtgtcccagagtacctgtcgtagtacttcctatgggtctcaaagatggtcctgttttactgaagatgatgcattctgacctctaactgattgtaagagcactcagggaagcatcagcataaaccaaaaactatctgtgaacgacaaaagacttaaaatggccataattaaagatctgattcattcgacaagaaattttttttttccctggtgccatgccacattttaaaataacaactggagttaggactgatgacataatattattatcggataaagtagcaccaggatgtgtcatggacacctagagcacctagagcactaacaaagttctaaggatttattataatttttcaagtatttatactaataatagttgacccatacaactataacctagtcaaggttcagcatctcttcttgtcaaagctttttatgcaactcaacataccaaatgaacctagttatttttaacatccttcattttacaagggtgcaggaacaaatcctttgaaatttttcaaaccaatctgagattaaaaaaaattttatttaagaattgacctgggaaaagcaaaatatcaaaggttgtaaaatgacaaaaggtttgaatacttggctgaataggatcattgctcactatgaaagaatgcatggctacctatgtaaccaagatgacaataaaagatttcaaaaataaatgtagaaggccacatgacggtaaaagtttttagttctttccaaagagaaaacactactttctaaaaaaattcaaggacatacaaaatcaacacaggtacttattctgataagaaacaatatttgtttcctatacagattacccaaaatataaaaaaaaaaacaaattttgcaatctcttattaagagaagaccaatagaaaagatgaaaatgttaattagtttgaccgaaataattgttttgcaattttgtgtgtgcgtatatatatatatatatatcaaaatatgttgcatacttaagtatattcaattttatttcaaaagagcagaccaataatccaagaatattttatcattttttaacaaaaagaaactacaactcatttttgatcaatacactgttgatactaagggtcatttgtaagagtttacatacacataaatccattccgttttagccagcattggctattaacataagactctccttccacaaatcttctgccatttccaatgttcattcagattttgtcctataccttcctcttcctcattttcacagtcattttaatttaggacaaagttattctctttttccttaacaaaaacacatccaacataccttgtatattttgcatacaaagttgtttccctttacccctaatgtttctggaagttttatttacatatattgattatatttttaaccattagtaagtcttattttatagagaaaactaggaattagctaagtgtgaactgtttgtcatataccagtatttcatagccaactagcaaagcttatgaatacaagttaaattcacctactcaatatgagggctaaaagtttacatcaatatttgtggaggagccttttaagattttcttttgccctgatatgtaatttatggaggctgtgttctaaaatttgagtaaatgactgaggagatacctagtggccatctgggtatctccaaatcccatctgaacgtacacggtatccagtctgtttccaattagctttttcaacctcaggtggttgcttctggggtttgagttttccagagcccccagtagtggcagggagcataacgctttagagaccatagagagttgagagactggagtaggaagagaaaggtctgtcatggatggacaaagagatggagcaggtacgggtttgaagaggaatatgctgaaggatttaagggagctaaagggaagatcaaaagtagtcaaaggaagaaggaggaatggtggtgatgggaagggagaggtcttagatgagccagcttagggagtgcttatgttttcggaagaggccattgaagttcatctttagtaaaaatcaaactaacaagaagagaagcctagtttgtgccatagaggtgaagcatctaatcagcagtagtcttcagaggaggagaaacagaatagtgagaatgtctcctggaggaaagaggcaccgaaggaacagcaacaacaaaaaaaggaaacatgaatgaggtctctacaaacgtgatctgtacagaaaatgatttctctaaatactgaaaatctgaagttgaaccaaatgagatttcaataagaattttccatgttctaaaccaatgatgcttttcaaacaaagaagcctgggactctagactcaagaatatactcagattactgagaatcaaaatctgatgttaccatgcttccacgctttcgtgggtaaggagtcagacttaccaatggattcccaattaatcagtcaggagtgtactcaacattcacaaaattagctttgcagaggttaatgtcattaaattcactttagaatggataattcaaattcaaatagtaactcccttagatagatgtgtactagctcaagttcacctgttatctgatttcatttttaaaaaaaattttttaaaagtggtgttcgggaggtaaggaacaaggaagagacctttagaaaaaagtttcagtgttttatattggatatgaaaatatcagtggaatgtgtcctgaaaaacactggatgacagttactggacaaaaagacaaattattcccttttaccatgcaactgaacacagatttattgaatgtttttctcctgagtttaggttgcctctgggcaagagtataattctggcttgataacaccttgaagcgtgtttgtttaagtttgtggatagtttcatctattagtggaattaggcatctgcttctctttatgaacactgggtaccataatcttcctcttactttttgttttttctactcaactccaaaaaccattgctgagttgaagtagaataataaggggaaagaaacaaaagactaagtttgaatcccagtgctgacacttactggctttacgatattgtttaactcacttaccctttttaacctgaccttcttcttcactaaaaatgaaaaattgagtgaatttccctgggactctgttagataaggcaaaactaagatgggaacacatttcctaaggcgtagaaaaagacagtgaatgggacctttcttgttgtatcaggagttatggtaagaggtactaacaataaaaattaggctttcagccaggcatggtagctcacgtctgtaaccctaggactttgggaggccaaagcaggtggattgcctgagcttgggagtttgagatcagcctgggcaatatagcaaaaccccatctctactaaaaatagaaaaaattagccaggcatggtggcacgcacctgtagtcccagctacctgggaggctgaggcatgagaattgcttgaacccaggaggcggaggttgcagtgagccaagatcacaccactgcactccggcatggggaatagagcaagacttctttaaaaaaaaaaaaaaaaaaaaaaaaggccttcaaaatacccctacagcagcaagttggtaccagaaaaacactccaaaaaagggagtagatggtcatgagattttcatcgttcaccaacctaacttgcccatataaggaaaaggataaacttgagaacagtttcttgaatgagaattcctggaacagatcattcaaataggactaacaatttgttggacatgagaaaacttctatgacttttactgttccctttcttatgagggaggggagaagagtgcttttcctctttgccaagccaaggaagagggcttcaaagaacctctattatagtggcattcagaccattgtatttataaaaaataaaaatattttagaaaattgaatatctgcttgcacattttaaagatgacatctattttctgcccttgggatacagtaaatattgacattttaaaagggtttatagtacagtttagaatgtatcccgtggaatccaaataccattgcaatataatgtctaccatcatatacttaaaaatacatgaaaaagctcatatttaataaatagaagttttatattattcctttttatttaaatcatatttttcaacttccccaatgaattgtattctaatgtgataaatatgtgatacatatttatgctataaagttttattagccactctatcataattctttataaaattatatttatgtggacttaaattcaatttttaaaaacaatttcctgtgactacaaggctctaagtatttttaaaattctctagattgagtagtatttaaagtattaataataaatacacttagtaataaccaaataacctaaatatatgtaccttttgataaataattattaaacatactcagtggatagttattgaaaatgaatctattatgagatggatgggtatttgatggtaccttgagtaaagaaggatttcagtcgctaatattttgaattgtacttttatttggcataaatgtatcttgactacaatgcaccagtgggataggtcagagaggtgtgcttttattttgtaaagcggaagaaagtctgtcattaaccaaaaagtgggcaagaaaattggaatgaagtgcctaccacaggaacaaatccagtcaaatcttttttttgtttgtttgtttgagacggagtcttgctcagtcgcccaggctggagtgcagtggcgtgatctcagctcactgcaagctccgcctcctgggttcacgccattctcctgcgtcatcctcccgagcagctgggactacaggcgcccgccaccacgcccggctaattttgtgtatttttagtagaggcggggtttcaccatgttagccaggatggtctcgatctcctgacctcatgatctgcccgcctcggcctcccagagtgctgggattacaggcgtgagccacctcacccggccgcaacatgctgttttaatgagcgcctgggtgcgggcagcctcaggcctaaaatggcgttagccccaagtgaggactggacaaaggttttatagtctcctgtaaacaggaagtctcctggcctgacgtaactgctgcattgtacccggatggcctctttctcgatcttcagaggtacttgtcttctggccggctctcttcctgcttctgctatttcgccggtgcatgctgctcaggcaagtagccttgtgccttaggaatgggcctgagaaaggaggagttactcatctccttaagctttcaggcccgggagagaatcttacaacccactgatgagttatgaaatccatttaatgggtaaaataaaatagaataagatagcatagggtaccaaagaatataacgcaggttattacattgtgttacgtgtggtatgcttaagtgttgttttctggaactgttgttatcatttgtattgtacttcatttttgtttcgaattttaagataatctgcacagttttatagaaaatgagttaattagtactgtatcagtgatgtcatactgggttaattattacaaagttgggggtaaatttatccctgtataacagactttaaagataatataaataggccaggcgcaatggctcacacctgtactcccagcactttgggaggctgaggcaggtggatcacgaggtcaggagttccagaccagcctggccaaggtgatgaaaccccgtctccactaaaaatacaaaaattagctgggcatggtggtgagtgcctctaatcccagctactcgggaggctgaggcaggagaatcccttgaacctggaggcggaggttgcagtgagccgagattgcaccactgcactctagcctgggtgacagagcaagactccatctttaataataataataataattttgtttatttattgaatagatactttcttccagtacaaaattcaaaagcattgaaatcctctgttgcattgttgtctttcagccacacagtttctctccccatgtgctgccaaggttttcagtttcctgggtagccttccaagaataggatgtaggtgtgtgtgtgtgtgtgtgtgtgtgtgtgtatattattttctactcttgtcctcttaaaataaagccagctgttagaatactataaatactgtttctgcatccttcaaaagatggttcttttgaagcccttttccttggcttggcgagggcagaaggaaaagcactcttcttcctccttcataagaaaggaaagactaaaatgcctgtgtgtgtgtgtgtgtgtgtgtgtgtgtgtgtgtatagcactcttctccctcccttataagaaagggaagagtaaaatgctgtgtgtgtgtgtgtatatatatacacacacacacacacacacacacacacaggtgattattttctgtattagtagttaaagaactgtctctttttttttttttttacagttgcatactattctgttctaaggatataccataattcacttaagcagcactccaattagtgagcctttagtttgtttcgacttttggctaagataagaaaatgtataactttgtgcacatcattttacacgttgcaaatatatctatgtgataaattcctagccgtcgaatggctgcgtcaaactggcatttgtcttgttagtacattttgccaaattgctcttcatagaacatctcgtcagtattaggaaaggtttcttttccccatacccgtgcccactcagtgtgttatcaacctttttgatcttctaaacaagaaaaatggtgatatctgtcattttaatttgaattctttattcattttgtgagtgaatttgaattttttcatgtgttgcagaatcatttttatttccttttctatgcactgtttgctacttttttgttttttgccaatgttctcttttgggttattggtctctttcttactaaggcaaatatagtttacaacttgaagtaaaaacatggttttctatgataaaggttttaatgaatgttttctacaacagacagattctagtcttaaggttataacctgaaaacatcaaaactaacctttgaattgcataggaatggtctttgctcttcttagccatcaatcctggacagaagttcaacatgatgacaaattgtagcacaagtagagatttaaaaaatttttaactaatatgtaaatatttgctttcattttcttatttatctaacaatacattgatggctagaacagggtttgtctttgcaaagagcctgtgtcaactgactcccattctttcaaaatacattacctaaagaaggtttgtggcttctctttgcattgcattttctagccaaatctgaaataactatctggaagcttaacattttattcccacacttatttttccttgtgaaaatcaaaactgcactttcccagtcttcatgagtaaccacaatggtttgccatttgacttgccagttgtattagcatactgagatgtaatttatctgcatcaagagagttaattctgagcagctgggggctttctaatctctttacccatcttggacaccagttccctctcactgctatttgttttattctttgcagttagaataccattcctcttgacatacaagaaacaaacccaatagaaattaaaaggttccaatttctattttccattcaccaatattataccattttctcctaaagcagttctactctctcctagatcattctcttgcttttgaaataaaccttaaaaagtcattttgtcaccctaaatatgtttatactttcttgaaataatgcttttactgcatattagaattttagtttttacttagcagtccttcactactcctttagaaggaaatttagataatactttgaaggaagttatgagagaacgtcagaagccatgctatcagttttttttttttatgtactctaaagaaaactctgctctgcccatgggtgtcatctctttctgattctgtgtggaggagaaaaatgggaacacttccaatcattttcaaacaatttctgcttaagtggatgaatggaccacctggtttactaactataatgcccaggggatggctttgattggcagacagaacgcggtgcagaaacaatggaagttaaatgaggaaggttttaaacttgcaagttacctcccttggtggcattgactgttggtagaaaataacacgttgggatttcagatacattcagacatgctctgcacttgcaatttgcaatacttaaaacaacacaattcttctaatcataactttttaaaaaatttggccacctttctccattgtctcataaagctatattcatgaagctgtttattcacaaagtcgtatcatttaaagataagtgttatatccataagtatgtaaatgaattaaaatctgggaggctaacacttatccattccttattctactatatcctatctagagccatgcttcttaaaatttaatgtgaaactgttatttctggtctgtggaaccacagtttgaaaagcactgtcatagattcttaagtagatacattttcatgcatacaataaatatgcaggagaagttaaatgggtatgtccgggagtcaaatattgattctcagaatgaaaacttcttcatttatttctcagtgatcttcataaccctttcccatactgggcagtgagaaaaaattatcatctcactctgaaatagtgatttcaccagtctctttttatgggttgggacctcatggataatgaccagtcttttagatttccttgctctcctcctgctcctctccaaaatggcagctgggttgacagatgaggaagcattatacatgacctgagatctctatgcaggtacttgcagtctcctctgaccctctgctctctggaacagtgcctcttgtctgcctgataagtctctaccctgctgaccttgtggctctgagcttgtattttcatcaggaaatacggttctctgctgactatatcagttactaaagggattcttaaatctctgagttactgctgaagaacacttagaattctaaatttgtaattatgatacctctaaaaacaagcgtgattatccattatgtataaggatgccttccaaaaagttggagcaacttgaagccacttgttacattgtcatttagtggaggagggagtgaacttggtgtttacaggtagaactctctatcaggtgctgtgaggaaaaacaaaagcaagataaactgtggccataatctttgttactttatttcccaatggggagaaaaagacaaatatatatatttgtcaaaactgaacagatgttatttgaacattatactgtatatgccattataactataatgtatataatacatatatataaattattgaacactaaaaagaacactttaagaattatctattttattttttttattatactttaagttttagcattaggagaagtatctattttaaataaagctatttcactcttcagtttccatctcaagaactcataccaatttaaacttccactcatatttgagagttgagaaaaattaccaaatgataataatatattatctaaaaaataatttaaagatgcatgtctctaacaaaactatgtaacattctgaagggttttaagtaatacttcatatatcctaattcagaataaacttagatgttatcagtatgaaaatatatcataaagtaacatgattctctccaatgaagatgtaatcatccaaactttatgcgttgaatttacggcttagaaatgccatagcaatatgtcctcttgaatatacaattctatatactgagatttcacttagtatattaagttctgtatcactgaagagtatattatgattctaattaacaaatacaattctattttatataagtacccctatcatctactaggcaaagttagctgatgttactatgcatttttttgtcagctgtactcaacttataataactttgtattccaaatacttcaaaattgccatatgcttactgttttcctattcacatcattttcccccctattcttcctgaccctcctttgagcaatagtgtcagtgggattagactcatgcattcacatactgaatgaatgaatcagtatgtgattcatgatatagaaaatttaaattccttatatatttcatatatcatatatatgatatatgtatctgtgcatataggggatattaaacacttctctgtatatatctgacatatattttgaaaaggaaacaccgtagggccaagttaactgcttcaattattacttagtgtaaatgcattcagtttgttctgtaatttcaaaatgatacatataaaaaagtagagtttgcatgtttaatacatctgaagctacagtttccaaattctgaacactttggtgacccccttgacacaatgaatatttggcagttaccgaacataacagggcacaaataatatagttaatgaaaacatccataattatttaaattaggctattttaagaaaagttttaatttgaacattaaacagcttaaaatcatttataataattgattatgtaacatgctggtcattaaaatgagattggtattctctttttttttttttttttttttttttttttccgaggtggagtcttgctccatcacccaggctggagtgcagtgctgcgatctcagctcactgcagcctccgcctcctgggttcaagggattctcctgcctcagactgccaagtagctaggattactggtgcccaccaccacacccggctaatttttgtatttttagtagagacagggtttcaccatgttgaccaggctggtctcaaactcctgacctcaagtgatccgtcagcctcagcatccgaaagtgctgggattacaggcgtgagccaccatgcctggccaagattggtattcttgacattaataattttggtaagcattaagaaggcaaaacatggaagcactcacaataatgtataggatccaagtaaaattctccttactgaaacatgaaactacaaagccatgtgcgcatacttttaatttttaagatttgtttgaaggaacttttgtgaatgacaagtagagaaagtgtggatagatagcatctctgtctttaaaattatttgatgaaataggtgataagaaacacaaaaattaataattcatgtgacctttattacaatacgtcttctggtattagcatagtaataagtattagtgatttacataattggagagataacacaaatacaaattatgcacacacacatacatacatacacgttcctgtgcttcactcaaaactgaacagatgttatttggacattgtactgtgtatgccattgtaactaaagtccaatttgttagagatagtattgttattttattatctttagtatcttcaatgagtccattatgaatagtagcattaactttgcttatgactagcttaaatagaactttggactccataaaaatacgaacaaagatttttaatggctttagaatacagaagtaatctggtaaaagtattcttgattttaatagaaaccaaacaatcaatgtgcccgttagattaacagtgaataatcagattgttccagctcttcactaatgaacaatgctgaaacaacattctctgtaggtctcctcagatagacatatgagaacacctagaagtggaattgttacctcattagagtattcacatttttaattttatcatatattgcaaattgcttttccaccagcagcaagaagtggcaggaatttattattttaatttgcatatccctggttgaacaagttttcaagtttgttggacagatttttccttctgtgagttgactcttcatatatttaccccaattttccgttggattgtttactttctcttaccgattaatatgagttgtctgtatattctagattctagtagagttctggattatatgcacctaatatataagtctacaattccttatccaaaatcttatcgttgacttttcaggagactagtgaaaatggctacttagtggaacatatggaaatcatgagttataagtgtataaaggctaagtgcaacagtctaaagacctggtatcacagatgaagactgacatattgagtaaaccaggaattggctttattacataatgtgtcctttttcttgatttcagaaacccatatatttgctgtttcctgtacatgtttaggaagagtattcagaagagagaatgcagatatattgttgctgtttttttttaaaaaaatacgagtttaattcaattacccatttgattgcttgagtttattagttatggtagcacttagaaagagttgttttagataatgactatgattttggtacagaacctaatagtaaaaacaaaacatctttaattttatttaaagtgcatgtcagtcatgaagtcagaattgaattgctcttttctttgcttttaatgaaaattagcctaatggctgttttatctttaaaaagcaacttctagtgtttaataataacagatttaagtaaatattctgttaagacttaaagaaccatgtccaattactatatggataataacttagagatgctctatattggtttaaaataatgcaaatatcactggccactattcagagatatgtcaaaatcacttttgtttaatatgtgcctttctagtccttagatctactgtattccctaatccttttggggtatataatccagagatattaggacccattcagccagaaactgaaacatgccatgatggttagaattcatcagaaccacactcaaatgaatgttaagagacatagcgtgataaaagtgcatctgaaagagtatatgaacagatgacattacatacaatgttgtatataagagaaaggaaggaaagacattcatatcatgtcatattaattcatgtacactgaaaatacagaccgtgaacagacattctttcatttgttccttcatgtattcaataatagaatgcttctctaccacagatgattccaggggaatttggcaattgctggagatatttgtggttgtcacacatgggggaggagaaagtgctactggcatcttgtgcatagtgaccaggcatgctgcaaaacaccctgcagtacacagggtagctcccgacaagaaataattatccagtcccaaatggcaatagggctgaagctgagaaaccctgattgaaactcacattacatcctaatcgaaactactttgttccgttctgagccgtaggattcatcaaataaaacctactttttattggtacaatatttaaatccagagaccctgtagcatagtaattatgtatgcaggatttgcctcagaaagactagggttcaaatctcagattcaccatatgttaggttgtgccctaggcaagtttctgacctttcgtgactctagttttttaatctgaaaaaatggtaatagtattgctgagaggctctgcaatggagattgagattaattaagatgatttatgttaagtgcatagcagagtgtttgcacttagtcagtttccaacaaatggtagcagtattacctttacatgtactaaatcatttcatcctgacctactatgaaaagcctgatcactttccatattttactgtttttaagataccattgattagagtatgcattgttattttatttttcaccaagaaaaatgtgctgccgttttagactatgacacgctatcatttataaaacgtgtcccaatttcagagcagctaacctgttgaaataaaatgtgagtcttataattgattattgtaaaacacaacagtaagtcttctttgattaggtgcaactgaacaatactatgaccacattcagtagcaaaggcacttagaaggatataggaatatagcttagcaggaaggtagcatcgggtatctctctttagtaggatgagtatgcgtagcaatctctgaagcacccagggagccatccaagagctattcactttgcagcacctgtccactctctcatgacatctcaggtgcacaggaaggaaacaaatcgagatgctgggtcaaccctggcctagaagccttatgcatcccagaggccaatgccttgtaacatagtttccaaggtcctcaaaaaggacatgcttagttacaagaattgttgtacttggggacgccccacaattatggttttccattaggtatttatagttcatatgtagaacacctaaccaaggtgtaatttaccagtccccatcatttttttttttaatctgaagcaatgttgcctgctcacacatttgacattccaactttatcagttttctagggagaagggagctagaaagttgatcaaagtacaaattctcatacagatggacaaagggtgtttttaaccctttactcacagtaatatctgttagtttcatttattttatatttaaagatactgaaacctgaaacttagagcagttaaatgacttgccccaactcatgggctaataagcctagaacccagatgttcttatttctagactgattatttccaacaacactgtaatatcctaaagcaagagtcagcaaactatggtccaagggccacatttagtcctccacctattttcagaaataaagagttattggaacacagccacatttatttgttcatgtattagacctgactactttcatgccacattggcagaatttgagtttggcccacaaagtctaaaatatttactatatggtgttttatagaaaatgtttgctaacctctgctctaaagtataattacaaattggccaggtgcagtggctcacacctgtaatcccagcactttgagaggccgaaatgggtggatcacttgaggccaggagttcgagacgagcctggccaacatggcaaaaccccgtctgtactaaaaacacaaaaattagccaggcttggtggtgcatgcctgtaatctcagctactctggaggctgaggcacaagaaccgcttgagctggggaggcagaggttgcagtgagccgagatcatgccactgcactccagcctgggcgacagagcgagactgtgtcaaaatagtaaataaataaacaaataaattctaattataaattgtttaactctttctatgagtctatataaggagtttatagaaaagcatttgtttctaatgtttgattattaaaaatacccctgtattttttattttattttaattgacaaataataagtacatatatttatgaggtacaatgtgatgttttgatatatgtttacattgtggaataattatgcatacttgaaggattttagagccacagagcctgaacctaaccgtttctctacatcagtgttggccaacttttttctttaaaaggccaaatagaaaaatttcagtcagtttttgaggcttcatgggccatttggtctctgttggaaatagtcaattcatgctaggattggaacctagataaccagactcaagagcccatactcttcaccagtaaggacttaggaaggcagcaagacctgggagtaccagtttaaatgaatgttcttctaagcagtgtcctgtgctgctattaaaccagaccagagctttggcccttagttaagaactgtatgtataaagttttccaaaataatggcttcaggttttcacaaagtccttccatccaaacaatgcagattgtacccccttaagaatctgttcttaactgccatctgttctctgcattcttaaagtctaatcttaatacagcagccagaatgatctgtttaaaaataagtcagatcacatcactcctctgctgaaaactctcctatgcttcctaatctcactcaggataacagccaagatccttccaaagatgcaggacctatcctcctccatccccaactctatgactatcattcctactactctccccttgctcactagattccactcaccctggtgtccttttttttttaattgaacatacacatacactcctgccccagggcctttgcacttgctgtctctgcacagattgttctttcctgagatagctacttgaatcgttccctcacttccttcagatctttatttaaataccacctactcagtgaggctttccctgcaggcactttctaaactctccacatgccacctccctttgccccatacctaagtctcttattcctatccagtgctttacattttgttctttagcacttttcactctccaaagcaccttaatttctcttttactacacattatcaccattagaatgtaagttttatgaggacacaaaaagtttgtctgttttattcgctgttacatatctagtacctcaaacaatgtttagcagacaataagtaatctgtcaatatttatggaatgactcaagtgattttttggaagagttttggtaatatttcatttgccaaaagaattctgccaaaaagactttgaaacccccactttaaggtggagagcttccatagaggcttctggatgttacttgatggtcacacctatgcccactctttcactggccttgaacatttcaagtatgcagcttagtagattatatcttcacagtttcacaacactttccagtttaaaaatcaatgctgcattatgctttgtatatttggacagattatttttgaaatccataaatctctaagttttttttttttaagtctccctttggtgagctgcccttgattagttcaaaatgggaagagagaacctgtcattctttgtcaatcaggttggcacgtacttgacagcatgcagttatagtgaaagagagctgtgttgcagtggtctagcaaacctaattgtagttaagtaaaagaacagtcacccaacatgagaggaaagacaaagaaactcaactgaacaatgttgtgtttttccatccatcagccttcatttgtcagagtctgactgacaatctggactgcagaaatcaggctctaacacaatattgattccatttcatattttgtttcttgctacactttttagcaaacagtttctgtatggaatgagagatagtgcagtcaatatatgcgaccagggcacatttatattaaaggcttactttggtttttttgtcccagaaatcacatattgtttgtttgttttactataatattgtaattgtcagctcttgctgcagtaacaaacaatgacaaaattccagtgacatataacaacaaacatttattactcactcatgtgtctgcagatcagctgcagctttactccacactatgaatcaagttaaggtcttttcattctagaatatggatctgctctaaatgtcttctcatcccaggaccctagcggaaagagcagcttttatatggcatattattctctcatgatggaagataagaacaaggggaaccagcaaatcttgaactgcctttaaagttccagctaagagctgccacacagtcccttctgtctgtccatggtctattggtcaaaggtacacagtcaagcccaaagtcaatgggaagggaagtatattcactgcagggcagccatattaagagaggaaatgaataataatgaactgacaaatcaaccatagtatccacaaatgtcttaggatttcattgattcccaaatgcattttttagtatttcaacacctctgaacttgagatatatcgtacaatagataatgtttacaaagtgtaggtttttttgttttttggctttcttagtttacataacaatagtggcccttatcatcaatgatagattagatagaaaaactgttaattgtggggttgacaaaatagccaaatggtagaaggcactccttataagtaagtaagttatgagtgggagctaagtgatgagaacacatggacacatacaggggaacaacacacaatggggcctatcagagggtggaggttgggcggagggagagaaccagaaaaaataactaatgggtactaggcttaatatctgggtgacaacataatctgtacaacaggccctcatgacacaagtttacctatgtaacaaacttgcacgtgtacttaaaataaaagttaaaaaaaattaagtgaatggacacttaatgtttacaaaaaagttgtcatttttatcttgaatttcttttttctgtagcaatatttatatctcattcagatcagcttatttgattagaaaaccaagcattaatagtagatcttatgtctatttattcacatattcatataccttcatttataaatatatattcatatatatttagaagatcaattggaaaacataagtgccattcccttatttaaaactcttgtagcttctccactacagttctgagggtggtatacaagatccttcttttctctggcttttgctttctatttctactccattacttcccattcccctacgtgatagctccgtacttcttctgcttcctgtctttgcatgttccatgttccctcttggaatacattctctctgccgtccatccccttataatgaggtgcatgagctgtttctgctcccagcctttctgtcctgaccttcttgtctatcaaacacaaaagtgatcagttcctgctctgtgctccattatacattgcactttactagttgttatacctgacctgctctaaatgtagtatatatttgtgtgtctgcactccccattcctaccccagtgaaacatagtaagcactgaataaatgtttgtcgaatgagcaaataaataaataaataaataaataaatgtttgaacatacatggaaaggttgtttatgtcctccttataatgtgctttgagatatatattcttaatatatatataatcatatattctaaggttattagtaggtaaaatgaaaatttaaagaaattgagtacaagaaaggaaaacaaggaagaattttttcctttttgtactatttctaagaacaccaaatttctagttaaacacacgcacacacaatcggcatgatgtagaattagaaatatgttgaataaatcaattattagaaaatgtaaatatatattaatttgcctctgacttgctacttttaccctcaagggttttttttttctacctcttttcatcactaatctttgcttcactgcttgtcagatcagcaactgcccattattagtaatgccatttaataagagataaataaaagtaaaggtgcttagagttactccatttcaaaaacctatcagggctggatttcagaagagaccatgaaattctcctactgttattgaaccattactccctattacctaattaatacaagttattttcttaaaattatacctgacattgtagtgaactatcaatactatgaagaaaatcaaactctcctcgtatcataaggatcttaacacctggtacacaatcttgcattggaggggacattaagaataaggcatggaggaaaaaaaaaccttaatggaaatgttctgttattagaaatgagactttttggtggaaatcccatgacgactttcttgtctgaatgttctttgaagttgaacactttctccttacacaagccggccactataattagctatgtttccattttagtggtggccttcttcaccttatctgaaatcatataaagatgtgaggccatttgcgagataaaaggtttgctcaaaccagttctctgacctggatatcagaggtttggcaatcataaacccactaagagaaaccctcagagctattacaaggctatgtaaaactttatttcattttttgtgagaagggacaggattttctctcatttatattctggaagaatattgtagaatgtatttgagttcaagaggaggagaaataattaacataatattaagaaacgtcaattttggaaagaaataataagcatatatgcacatgtgcgtgtatgcacacacacacacagtatacacaacagattcagaaagaaggaaatagagatttggtgacacatacttcctggatataatctcaactctgccatttgcaagccacatggtcttggataattgacctaatctctctcaattgcagcatctgtgaaattagataaaactttctttgtaggagtgtatgtgtgtatgaaaagcacagtgtttgacatataataaatgttttagcaactgtagcttgttaatattatcacagcagttaatatcactatagcagttagttgccattttcagcacagctaataattttagtagcattttctgatctttccatctcatgtggtttctttggagttgtttcttgctttgttttttagcttttctatgtcacattttatttgcatggagaaataacaaattttacaatttatttcacatattctttaatttttaggataattgtcagtttcttacagtttattttccttatactcactgaagaaaatatgtacgaaagaatattttcagtgaagttaattggatttactacagttgacccttcaagcaatagtatcttgcccttaataactgacctatctttgaactaataaattcaacctgcaaataaatgtagtgaggtaaattgtagaaatttatcttcaaaatggtctttctaaagtgatctatcaaaggtgcatttaattagaggtccagttctccaaaaatgtgccaaggaaaagtagccacaaagaatttagagctgaaatgaattctttcacccattgctctgtttctatagaactgagaataaatctcatatgggtacttaaaatctgtactatgtcattgaaggatgaaaagatgacaatagtgatgatagaaggacacggtaataggaaacatttcaatagagggaaatgatgtgagtatgcaatgttcattcaccagaggactaaatctagggctattttggtgacttgaacagggaatattctacttcctgcaagtgaaaaatatggacatttcatttggcatgccacctgctcttcagtccatcatgtagcaagcacccacttagtactttggagctctaagtaatacttggactactcaaatgccagccttgttgccatttctgtttattcgccaataacaattttattaattaaaatttgtatgtggatgtcttaaggaaattccttgtagttgtcaaagcagactcctgatcctatctatctgccagtgccttctgagtagtggtatctattcttcatgatttttggaactatttatgggtgattgaagaatatggagtggatagagaaggatgctagtcatttggctgcacacaagaaacacagatgaaatttttgactatttctgttcattttctaaaggtacagaattttcactggattgtacttgtaagcaattttaaaggaagaaatatccagccttttgaatttgttacagtgttgcaagacttttttaaaatgttaagaatttttatcatataggatgaattaatactctcataattttaggtttgtttcttccataattaataactatccttaaagattgtgtgtgtgtgtgtgtgtgtgtgtgtgtgtgtgtgtatttcttgattttccagagcaaacgttcccattcatttgttttactcaccttgttatagttgctcccattgtaagatatatctagtaagtttactgttgttacctaaatctgtttgctgaattttaaaaatgggaacatgtagtaaatttgggggaccacgagctagtatttacaaagtaaaccgagaacattggatataaaaccttatttcatttaacctccaatgaaggatatattcagtattattatttgtattatttcttgagcttccttgcttatctgtaatatgtaacatggtggcaccccttttcatataattctctcctcacttctattttgggtttttacatgttcttgtttcagtctcttctgctctttctatcttttcttggttcaactttcttctcttatcctgtggaggcgaatacctaattctggctctatcctcttcagtcactctacaagtatcactgggacaatattgtccaactactatttttacctccaaacctgtattcttagccttacccctaatctgcacactacgcttctttttgcaattactttctgtacatttgcatcagtgttaatcacaggcatcttgactcatgtctccaacctgaaaacattattccttccatatagggacaggctcctctgtcttccctgtacccctagacagtttctcccaagttataaaatcttggtgattctgaaaattttctttttccccatcaagtcctgccagtcctttatccacaacataggaataatacttcctgaacatccgtgctgctcctgtttgttcaataagtactcggacctctaaaggcatttcctatgtttcttccaccagccccttatccttaaaatcttgcctccaatctgccgctagagttatcatcttaaaagagtcaaatcagggttggtatccaagaaatattacaaagtactaagctcttggtatatacaatcaacttgagagaaagagagggacgggaggagagggagagagagagagagagagagagagagagagagagagagagagagagagactttattctgtcctctataacacctgaatgattctgtacatatttatgttaacagagcattgtactacttcaaatccttatacaagcaaaactcctcaccgccttttggcaatggaacttgcttttccctctgcctgaaatagtcttcagtatgttgacatgactcatttcttcacttcattccatttcctgaagagaggagcagtcttctgtgctcacattgcctaaaatagagcccactgtcactctctacttactctttttaatctttcttcatagcatacatatacatatatatacacacatatacatatatatacacacatatacatatatatatatatatgtatacacatatacaggcatacctctgagacactgaaggttcagttccagaccaccataataaagtgagtcacatgaactttttggtttcctggtacatatagaagtcaggtgtacactacactgtaatctattaagtatacaatagtgtatgcctaaaaactaatgtacatgccttaatttaaaaatatgttattgcagtgttcaagctgagagccaaatcaagaatgcaaactatttacaataaccacaaaaaataaaatatctaggaatacatctaaccaaagaagtgaaagatctctacagggctaactacaaaacactgctgaaagaaaccatagataacacaaacaaatggagaaacattccatgttaatggaaaggaagaatcaatatcattaaaatggacatactgcttaaagcaatctacagattcaatgctattcctatcaaactagcaatgtcatttttcacagaattataaaaaactatcctaaaattcatatgaatctaaaaaacagtctgaagagtaaaaacaatgctaagtgaaaagaataaagcatgatattaaccaacttcaaactatactataaggctacagttacccaaagagaatgggacttctacaaaaacagaaacttggaccagtagaacagaatagagaactcagaaataaagccgcatacctacagccatctgatctttaacaaagtaaacaaaaaaaaaaaaaatggggaaaggactccctactcaataaacggtgctgggatagctggctaaccgtatccagaggaatgaaactggactcctacctttcactatatacaaaaattaactcaagatggattaaagatttaaaaaaataaaatctcagccaggtgcggtggctcacgcctgtaatcccagcactttgggaggctgaagcaggtggatcacgaggtcaggagattgacaccatcctggccaacatggtgaaaccccgtctctactaaaaatacaaaaaaattagctgggcatgctggcgcatccctgtaatcccagctacttgggaggctgaggcaggagaaccgcttgagccagggagtcggaggttgcagtgagcccagattgcactgcgccactgcacttcagcctgacaacagagcgagactccgtccctaaataaatacaatacaatacaataaaatctcaaactagaagaatcgcagaagaaaacctaggaaatactattctggacatcagccttcagaaagaattcatgactaagtccttaaaagcaaatgtaacaaaaccaaaaattaacaagtgggatctaattaaactaaagagcttctacacagcaaaagaaactatcaacagagtaaacagacaacccacaagatgagagaaaatatacacaaactatccatcagacaaagatctaatatccataatctatagggaacttaacaagcaaaacgcagataaccccatgtaaaaagtgggcaaaagacatgaatatatagatacttctcaaaagaagacaaacgggtggctaacagatatgaaaaaatgctccacatcactcatcattagagaaatgcaaatcaaaaccacaatgagataccatctcacaccagtcagaatgcctattatcaaaaactcaaaacacaatagatgttggtgaggctgcagagaaaagggaacattatacgctgttggtgggagtgtacattagttcacccactgtggaaagcagtttggggatttctcaacttaaaatgcactgtcattcaacccagcaatcccattactgagtatatatccaaaagtaaataaatcattctaccaaaaagacacatgcacttgtatgttcactgcagcactattcacaatagaaaagccaaggaatcaacctagatgaccatcaatggtggactggatgaagaaaatgtggtacacatacaatatgaaatactacacaaccattaaaaagaatgaaattatgtcctttgtagcaacatgcatgcaactggaggccattatcgtaaatgaattagtaggaacagaaaaccaaataccactttgttctcacttataagtgggcctaaacattgggcactcatggacataaagatggcaacagtacatactggaaactagtaggggaagagataaggaaggggcaagagttgaaaaactaactattagatacggtgcgcactatctcagtgacaggatccatcatactccaaacctcagtatcacccaataaatatataaatgtaacaaacctgcacatgtaccccttaaatctaaaacaatagttgaaattatttaaaaaaatactttgttgctaaagcttgctagcagtcatctgagccttcaatgagtcttaatctttttgctgatggagggtcttgccttgacggagatagctgctgaccgatcagagtagtaactgttgaaaggttggagtgactatgccaatttcttagaataaaacaaccatgaggtttgctatgttggttgatttttttcacaaaagatttttatgtagtgtgtgatgttatttgataacattttacccacagtagatctttcaaaaatgaggtcaaggctctcataccctgctgctgctttaccaactaagtttacagaatattctaaaccctttgttgtcatttcaacattgtttacagcgtcttcaccaggagtagattctgtctcatgaaaacactttgttttgctcatctataagtagcaactcttcatccattgaagtttcattatgagatgacggccattcagttacaccttcaggctccactttattctagttctcttgcaattttctccacatccagtgacttcccctactaaagtcttggaccctcataggcattcatgagggttggaataaacttcttccaaacaccttgtaatgttgatatttacctctttctatgaatcacaaattttcttaatggcatctggaatggtgagtcctttccagaagattttcagtttacccagatccatcagaggaatcgctacctagggcagctatagccttacaaaatgtactttttaaagaataagacttgagagctgaaatgactcctttgtccaaggactgcagaatggatgttgtgttagcaggcataaaaacaaaatctcttggtacatcttcatcagacctcttggctgaccaggtgcattatcaacaagcagtaatatattgaaagagattttttcttctgtgcaataggtatggccagtgggcctaaaatattcagtaagtaaaccatgctgtaaagagatgtgctatcatccaggctttgttgttccctttatagagcataggcagagtctattagcataatcttaagggccctaggatttttggaatagtaaatgagcattgtcttcaattgaaagtcatcaattgcattagcccctcaaaagagagtcagcctgtcctttgaactttcgaagccaggcattgacttctctctagctatgaaagtcctagatggcatctttttccaatagaagactgcttcatctacactgaaaatctgttgtttagtgtagctaccttcatcatcttagatattagcttgatcttctggatagtttgctgcagcttctccatcagcacttgttgctccacctttcacttttatgttacggagagggcttcgtcctaaagcctcatgaacaaacctctgctggcttccaacttttcttctacaatttcctcacctctctcagcattcatacaactgaacagaattgggccttgctctggattaggctttggcttaggagaatgttgtggctgttttgatcttctgtccagaccactaagacattctccatattaacaataaggctgttctgctttgttatcatttgcatgttcactagactggcacttttaattttcttcaagaatttttcctttgcattcacaacttagctaacgggcacaagaggcctagcttccagcctctcttggctttcgacatgccttcctaaccaagcttaatcatttctagcttttgatttaaagtgagagacatgcaactcttgttttcccttgaacatttagaggccatagtacggttattaactggcataatttcaatattgttgtgtctcagaatagggaggcccaaggagaggaagagaggtagggggatgactggtcagtggagcgttcagaatacatacattaatggattaagtttgccatcctatatgggcactgtttgtggcaccctgaaactattaaaatagtaacatcaaagattactgattacccatcaccataacagttataaaaatattgaaaaagcttgaaatattgtgagaattatcaaattgtgacacagagacatgaagtaagcacatggtgttggaaatgttgctgatagacttgcttgatgcagggttgctacaaaccttcagtttgtaaaaaaaaaaaaaaaaaaaaagcagtatctgcagagccaataaggcaaaactcagtaaaatgaggtatacctgtacatatacatacatgtgtctatatatccactcacacatatgtgtatgtgtattatatgtgcatattatacatatatgttgatatgtgtatttatcatatctaatacacatatatgtatatacatgtatatcacacacatatattcatattgtaaattgaaaattttctagtgctgtatcccaatctctagcttataaatatattgaatagatgatgcagcaggtatcttttgaatacgcactccaattttagaaatataaatcttttttaaaggttggaataatataagtagtttggtgttcagtgcaaaaggttttaatgtataaatactatgaaaacaaaagttagatcaaatgtatcaaatacaaatgatctgtattgggggacagagggacacattaaatttaagggaatatgaggagaatattgacttcctatgctcgatgagtgaaaaagaaaagtgaagtgggagtgtttgaaaggaaagatgagcttttccatgctagtacatcacaggttttaatactcatagaagtttttagatttgtataggaaatatgatcctccagcctttccaagtttactcttctactggaattacaaatcaaaactaataaatgtttactatgcttcaagtgcaatagttataaagtacctgattagaggtcccacattcagatgttggttatataaaatattcatgctaaatcatataaatgctaaaacatttgtatttgtgatgttctcttggattgctagatggagattaaattatacaaattcagctaagaagaaaaatgtgggataaatggaattttagtttaaaggaagtcaatgaaaggattaattaagtataaaataatcccattttaatttgtcatagaaatgagttttctgagacattgttgtaatcaataacgtgaagatgtaaaattttgcaaaaaaaatcattacgggaaatccaaaagcagaagagtagactctgtatttaactctagcagattatttagaaagaaaatagtctatgccatgaacctttcgactgtctgcgtgaacaaatgtctctagtaatacacactcttaactcaattcccataggctcaaagttgcaacagtatttatttgcccgttcaacggttttttgtttagcacttactatgtgttaggcacttccagggatatgagtgaacaaggtagttatgggtcttactctcatagaggataattctttaggaatggtcaaaactatacatatacacataatgtgattaattgtgatgtgttttgaaggaggaagcaaaggagttggaacagtttaaataagactgtaggttggcagtgggaacaatggtctttgctatcatttttcaaaaattccaatgaatgggaatgacgactgttgcattaagttgcctgtctccctctgacccatagtgattctctattatcagagaggtagggcatgtttttcagcatatgtgataatatcaaacagattcagatggtgaaagtaaaatttcttaatgcttagaaataacataatttgatcaaatcatttggatatgttattaagttgttgtaagatatgaagacgtagctgttactactgccaatagtataaactttggattcagacctagctgtgtttgaatattaactctcccacatcccacgaggttgtgggcaagctattcacatcattgtcactaccgtcactactatcccacccacccttgcttcattttcttatctgtaaagtggcaatctgttggaatcagggttggggaaggcaaatagtagtcattatacgaatggtaactatgctatcatcaataatatagtctacagctatgatgaagctaatcagaaaacattgtctattaccagtaattagctatatcaataactatcacaagaaaagtcccagctgtcagtgaataaatagaaaatagtgctttgtcttagagaaacacatacaaaatgaatggtggtgacagtgctttaagttaacttgtcagtttatatgtgtaatgcatatataatttcaaatgtataatttagacattgtacatgtatatttggcctggtaatttatggtatacataaatgataaatgtataggttgaaaattcagttactttttttccttttcttaaatcatttttaccttgctgaagatatgctcttttctctacttccttagaataatatattttattttctcttaaagtattttgagaccatatcaccatttactacaccaaaatgtttttttgcaaatgcggtattcaagggtgaatttatagtggctggggacctatttggaattcagtaagtaaaactagattttccttattcctcatctgagatcagagctatttctacctctagcaaagacatacagtcattccgggtgctgcattttcagggaacaatgtgttttcttggcaaggggcagtaagaccatcaattaatagttcttcatgtaaagtagctaaactactgttataaaggaagtgaaatttgcatacataaccattaacacatgaggttagttatgtacaattttgaccaaagtgcctgtttgctgctggtatttattataataagaactggaaaaaaatagtctatctcaagagcatgtgctgagcacccgtaaattgcaagagactgtactgggcagtatgagattatagtaatttgggatttcctactaatgaactgagagggaacaggtacaaacacagtatacgaaggaaacagtggcacggagacacttaaacacagcagtgctgggaggctccggggtaggggagggaggaagagagatacgggttaatcaggagctgctctctggggaagattgcccaggccctgactgatgcctgacattgattaattgatactctatcctagtgtttaacaagtgttccatccaaaaagtcttctgtaatatttaacttcacttccttcagcttcaatttctgcacaattcttttgtcgtctcatcaagagagctagtcagcagacagtaacaaaatgcttatattcatatacctgaaggatttttttttgtcatgcttcagccttctccagactgaagaaaagcaaataataaacaaaattaatcgttcttcagaaggcctgtttgactcattaataaataataagctttgatactgtgctttaagtgtttaccctttggaaagaaaataattttgacagtgatgtagaaataattatttgatatttatttcaaaacaaaatttatatccaatactaaacacagaattttgtaaaacaataagtgtataaagtaaaatgaacattaggattattgagattattgtagctaaaactagtgtttattcatataaattatgttaataaattgtattgtcattattgcattttacttttttgaaaagtagttaatgcctgtgtttctatatgagtattatataattcaagaagatattggatgaattttttttaagtttaatgtgtttcacatctctgtttcttttctctgcaccaaaagctacatttttgtgcccttatgtaccaggcagaaattgatctgcaatacatgtggagtctccaagggtatatttaaatttagtaattttattgctaactgtgaagttaatctgcactatatgggttcttttccccaggaaactgaaatagcagttcaagctaaacaaccggatgtggaagagattttgtctaaagggcagcatttgtacaaggaaaaaccagccactcagccagtgaaggtaatgaagcaacctctagcaatatccattacctcataatgggttatgcttcccctgttgtacatttgccattgacgtggactatttataatcagtgaaataacttgtaaggaaatactggccatactgtaatagcagaggcaaagctgtctttttgatcagcatatcctatttatatattgtgatcttaaggctattaacgagtcattgctttaaaggactcatttctgtcctggtgtgctgccatcaatacaaaagtagtcccaccttcaaggtagattaaattctttggggctttattgctttgcttgccagccttgatgcttttcatattgtttggtttaattcaaatcaagctactgcatcatagtgtctgtctccaacagctgtaaagaatcacaatatggtccgtgacctttcttttctttgttgctctttcttataaaagagtaaaatcggcattgaggcttcagtattttattgggtcaagaatttttagtgaaatgtcatgtaattgcttatttctttggcaaaaagctggcctgggataaacctttctacttttttttcttctccatatccatgttgaagtctaggtcacatttattcacaggctattacataaggagggagatggaaagccaggtcagttttcaaaaaatagctaatcaatggcttccatttgcaaatgagagtccagtgctaaatatacgttagcagtaggttacctgattctctgtacctgaccagaattataatggctcccattatgatgaaggttcctgagatcctgtaatcatggctgtttattgatcagtcttggtttctcagttaatgttgcaggcttggatacaatgaacctcgtcctcatgtttaaaactgcttgaaaacagttcaggtcaataacctcattatacagaaccagtttgtccttgcaaacaacattaccatgacttagattctgtctctaaggtcgctgcttagtttcccttgcgcttggcccaagcttcatttctagaagattgtttgttttccttacagcttacaagagacttttccttaggtagagttgaagtttgcacctgagcttaatgtccaaacaccagacactgaaaatcacaggtttctctgtagatatcaacatacttttattcagaaatatattgcaaccactccaaaaatctagaaaagtagtttgtatccagttcaagcccagtataatcatttttcataagctaacaatgtgctcagtatttagttggaagagctaggcaaagtcctgaaagcagcaaatttcagagtttccgttgatgttctgaagaaagccagccctcagagcagttaatatggtgactttcattgtagcaagccatgcagtgcacaaatggacaattgcatacgtttctatctactctttgttgatcctcaaagactttatgccttatggtgtatgactatgaattaaggtttgtcactaattgttagagatcacaaaggtacatgtaatttggcttttacttttgtgcctttgtaaaagagagagagagagatcttaattaaaagccactgagaaaatttttgctttcattatgtataaaacaatccaaatgcttgatgctaacttatcgcacctccacccacacactcaactactgggccacttggagatcagaactgggatctgccatgcctgagcatatctgcttcctgctgatgcattagtgatgtaaaaggagaattacttttctgaaataaaaagaaagaaccaggagctgttgctttccttctctttcacaacccttaaaaccatttttgtagcagacagcactgtttttttccttcctttttttttttctccttccctgtttccctattttctctcaatttgacacattgggagaagctgaacttaagggaaaatttattcctgtcttcccatttctcccttggatttggagaaaaatcaacatatcaagttggctgggcatggtggctcatgcctataatcccagcactttgcgaggccgaggcaggcggatcacctgaggtcaggagttcgagacctgcctggccaacatggtgaaaccctgtctctactaaaaatatgaaaatgagccagctgtggtggcaggcgcctgtaatcccagctacttgggaggctgaggcaggagaatcacttgaacccgagaggcagaagttgcagtgagccgagatcgcgctgttgcactccagcctgggcgacacgagcgaaactccgtctcaaaatatatatatatcaagttgataggggcaaaaatgcaagaatgatttgagaattatggggtttaaaaaaatagttgactcacgcacaacttttgctgtggaccatgaccttggaaacatctgaagattagctggggtttgcggtagcctgaaacacctagaggctcaaaaaatgacctcacagttttgaacatgacacccagcaatacaaggcagaaagctgtgagggctgtttaaatctctgcatggatcaaaaatttatttttaaaggttagagatgatttttctgaaggacactccattgctctgatagaacgtgaacaaagcctttttaaactttgagtccatatatcaaaatttaaaatttgtcctatttataatgcctcttcttcactctgggtcttgttacctcttaatagaagaggaaatgagtctgagtagcctgcagcacattttcatgagagaattgtgtttctgtttttgttttttgggggaggtgcatttggaaactgtaataattatgaagaaaatgatattctttaaaaagaaaatgaaaatctctcacgatgtatatgcaagatctagtatttaaatgcataattagtgtgtccaccgcttacaaacattctaattaaagacacatcagggagcaattctgtttcttaggaaattgacttgtctattggcacctccgcattctgcatcagacagcctgtctgtccagctcctacgctcacctcccaagctgagttctgattggaagctgggttcatccctgctcagtttctttcctctttcttctttccttcacttcgtcaacttctttaagatttcttttattttcaaagatggtatatttctggtttcttttttaaaatctctgactaaccaacttctttattttctttgaggacttcctgtaaaaggtcaaatacatattatgaaatgataatactaatgacgtataggtagtactaatctctgctgcaaaataactggaaaaatcttaggatcgtatgatcaaatacctctccatctttgtttagcacttcaactctctttctctctctctgtctctctctctctctctctctctttccctccctccctctccactctctccctctctccctctctccctctctccctctctccctctctccctctctctctctctctctcccccttcctcccccatctacacacatacttttatttatttgtatgttatttcttcatcttaacttcagaaattactgaagactgactatatgagttatataaattgtttaaaattttgctaaagttatagttttggtataatatattacattaatgccatagatgaaatagtctttaatgtgttccatttttccacacagtaataactaggtcctcaatagcaccccatttagcagtttaaaagcagcaaaaacaactgctatcagtaacaacaatataaactacaaaagaagccatttgttatttgatttttattataaaattgtatttttaactgtcttgagcttaagcatttaggtgccattttcttgtattcatactcatttttaacttaagttggaaaactacactttcagttaacttttaaaaatatgtttatgtactttcaatgcttacatcacctgccatgtattagaactgagagcattaatggaattttaaatgtcttggttactttctaaagtgataaaatgaagccagctggtttgctttgctaactttttatattatcaaaaaatgttacttacacaaacctagtaatatgttttacttactgctcttgaattatttttcaatgtaacagaaaaaggtgtgaggaactttctgtatttggccaaagcgttccatcccaacctttaacacaaaataattgctgtagacaaatggtcaagagggcaattataatcttccaggcatcatttcctcagatatgaactgcaaaatgacagcatcattagtcattttcaattacagtcagtcacaaccagggatgattcattttcccagctgttttgttgttaattaactagatgaagctgtttttttttctcccaatgagtttgttctactgccaacatcaacatcttaacatttttaaaaacttccttagggtttattttttgcctaacaatctttaatatattactcacaaaagatgtgcatctcaagatttatccacggtatagcaggtcaaatggtatttcattggtcgaaatgttgccgaaataaatataattacacttaaaacaatacttggatttcataaatcatctgccatgcgtacaatctcatttacctggtgtaacttcacttgtagcaacagaaatcaatagagagataacagacaaaaattgtcccctgaaatgaacaagtctattttgactgactcatttattgagcacaatttccatgccaataacaccagaataagttgggagaggacttctagaaagaagataacaatattagaggcatttaataatttataagtaaatgcatagcaacattttatttttttaaattacaagtttgcgactgggcgcggtggctcgcgcctgtaataccagcactttgggaggccaaggtgggcggatcacaaagtcaggagatcgagaccatcctggctaacatggtgaaaccccatctctactaaaaatacaaaaacaaaattagccgggcttggtggcaggcatctgtagtcccagctactcgggaggctgaggcaggagaatggcatgaacccgggaggcagagcttgcagtgagctgagatcacgccactgcactccagcctgggtgacagagtgagactccatctcataaataaataaataaatacaagtttgctttacaactgaaaaaaaagtcttggagtataagaggttgaataaatgctaatcccaatgcataaacttgaggagagcttcactttcccaatgagaagagaaaaaatttataatagatttttgggcaacttgtaaacataaacatttagaaatatggatgagattgtcaaatgtctaattatattcaatttcttaattgagtagcatttccatatttgcagtcttacattttataaaataacacactcatttagaaatacctggcacatttatattttatgaaacaatttcattcaaacccttcgtatgtatattctagaattgtagagctcatcaccttgctaagttatttgtaatatggcattgtttgaatccctacataatactctgaaagccctctggccaagattacaagcaacatatctgtaatcaaaaaattaagaatatttaccttattgcagcaagagcgtaaaacacttcagagtgtgggcatctcagtaagagggcattggaaaaagcttcttacagagttcagctggctgcatgattctaaggaggaattcagaaagtagaagccatttctggattagatgctttcaagaaacagagtcaatgtagtgattaggtatcttagtgtttatctagaagatgagattaaagtagggctagacacgtcgttggtaaaggagcagcaatgcctcatattagtcatttctgtgatagcagaaaggccttgtctctgtcttgtttcaaacacggccatggggtggccttgtgtctgcctagtttatttctatgagtgttttttaacatccagctgggaccatcatggcctagctagctgccagctgccagctatcagcagagctatttttcacgttctcaatgctgtcgctgaaatttttatcccaaacttcaatacccattcacaaaatattaggaaaactgtttttttcatttttcttagatatgattttggttgtttgtttgtttttgagacggagtttcgctcttgttgcccaggctggagtgcggtggcgcgatctcggctcaccgcaacctacacctcccaggttcaagcgattctcctgcctcagccttccaagtagctgggattacaggcgcccaccaccatgcccagctaattttgtatttttagtagagatggggtttctccacgttggtcaagctggtctcgaactcccgacctcaggtgatcaggctgcctcggcctcccaaagtcctgggattacaggcgtgagccactgcacccagccagatgtgatcttttaaaaattcccaatagactaacatattctttctgctttttaagttgtttggctttttaacaaattctttgaaagactcgtttacaatgatctctgccacgagtgattgtgaagctatacattaggaatgattgctaaagatttatcaactttctttgcctccctttttaattaagcaaattctgtcagaatacttatgtaagcatcacatctcttgaggttatttcaggctaatatacaacattgtggttccgaataaaataattgagacataagagatagtataaagtcttgaatatgagccaactttcttttctgagagaatatttgagtgaaaagtctcatgtactcagtagctcatgctgaaattagggaagcattttagagatttgaatttcacctcttgtcctcagttgtattagttacacttaaagagagagacaaagagacatagatgtttcagttacaatattcgaatgtatgcctgtatatatacagccgtaggtagagtcctttatttattcagtagatattaattgcatgccaaccattgacacaagatatatttttaaattttgaaaatctcaaactcaaatagagtttaaaactatattctagtttacttttttaaacaaatgattttttatgattgtattaaacaaatacattatttttccttacttattctacatcaaataatatctatttctagaaggcttttttccttgtcttaatgatagaaaacataaaaatcatttaatattttttaaatatccaaaaaatatgaggcaagaaagcagccacaattgtagctaccttaggaaacttaattaaaaaatttttttttatttttaattttatatgtgtataattgtacatatttatttgtgcggtacaagttatattttgcttattttttataatttcagtagttttgggggtataggtggtttttggttacatggatgagttctatagtggcgaattctgaaattttttatgtatccatttcctgagtactatatactgtacccaataaatagtcttttatcccttacctcactcccaagctccccacttagagtccccaaagtccattgtatcactccgtatgtctttgtatcctcatagcttagctcccacttacgagtgagaacatatggtatttagttttccgttcctgagttactttacttggaatagtggctgccagctccattcaagttgctgcaaaagagattcttttttatggctgagtaatattccatggtatatagataccacattttctttatccattcattggtcgatggacacttgggttggttccatatcttgcaattgcaaattgtgctgctatttttgtgctgctgctttcttttttgttatttccttttctggttttggtattagggtgatactgacttcatagaatgatttagggaggattccctctttatcttttgaaatagtttcattataattggtaccaattcttctttgaatgtctggtagaattcagctgtgaatccatctggtcctggacttttttttggcaatttttaaattactgatattcaaccttgctgctcgttactggtatgttcagggtttctttcttttttttttttttttttgagatggagttttgctctttcacctaggctttagtgctgtggcatgatcttggctcactgcaacctccaccttccagtttcaagtaattctcctgcctcagcctcccaagtagctgagattacaggtgcccaccaccacgcccagctaatttttgtatttttagtagagtcggagtttcactgtgttggccaggcaggtctcgaactcctgacctagtgatccacctgcctcagcctcccaaagtgctaaaatcacagacgtgagccaccgcgcccagccaaagcgttcagggtttctatttcttcttgatttaaactaggagggttgtgtgtttccaggaatgtatccatttcctctagattttctagtttgtgtgcataaaggtgttcatagtagtagtgaatgatcttttgtatttttgtgatgtaggttgtagtgtttccagtttcatttctacttgagcttatttgaatcttctctcttctttccttggttaatcttgctaatggtctatcaattttgtttatcttttcaaagaactatttgtttcatttatattttgtatttttttgtttcaacttcatttagttctgctttgatctttgttatttcttttcttctgctggatttgagtttagtttgttcttgtttctctagttccttgaaatgtgacattaggttgtcaatttgtgctctttcagaatttttgatgtagtatttaacactatgaactttcctcttagcactgtttttgctgtatctcagaggttttgataaattgtgtcactattaatcatttcaaaaaatattttaatttccatctcaatttcattgttaaccccaaaatcattcaagagcagatttcttaatttccatgtgtttgtatagttttgagggttccttttggagttgatttttagttttattccactgtggtctgagaagatacttgatatgattttgattttcctaaatttattaagactttgtggtctcttgtatgacctgtcttggagaatggtccatctgctgataagaatgtatattctataattgttaggaagaatgttctgtaaatatctgttaagtccatttgttctagggtgtaatttaagtccattgtttctttgttaagtttttgtttcagtgacctgtctagtgctgtaaatggagtattgaagtcccccactattattgcattgctgtctatctcatttcttaggtctagtactattgttttataaagctaggagcaccagtgttaggtgcatataaattgagtactgtagtaaatatcttcttgttggactaatccttttatcattatacaatgtctttctttatcttttatttacggttattgctttaaagcccattttgtctgatataagaatagctactcctgcttgcttttggttcccatttgcatggagtatctttttccgtccttttaccacaagtgatattttgatacaagcatataatatataatgatcaaatcagagtgattgcagtatctatcaccttaaatatttatccattttaaattttaaaaggaaagctatattcagaaatcactttttcttgtaactaattcctgttcttcataaagcagaaatttcatagtttgatatagttgtcttaacatttaatgaatattttcaagcaaagtatatacaatggagaataatgctcagctgcaaaagtcacctataataaatctgatttttccatttacaaacaaaagaattcccaaagtttatccattttggtagaacacgaattcactctgttgagtttggagctcttgtgcggaaaaccttggacctgcaatttagttagcatattcaaagttttaaaattatggagatgtagtcaagaataggacttgataactattatcccactgatacgctatttaaataagttgggatttaagtacttatttgatttccttaaatttgcttatagatgattaacatgtattgcaaattgttaccttttacagatttctattgagcactgcttaaattttattatatgatgaacacctgactagttgctacagccaaacattttttgttatgcaaatgaattttacagcttaattggaatgatgagagaattgaaaatatgggcaaatgccagagaagtgaaaagcaaaatgaagcaaaacaaaaaagaacttgtataatatataaataatccatttcaactctacagtacaccaaactcttgaaaaagtagcaagattgtttttgtgaacagccaaatcaaaaactgtagtcatttcataagtatttgctaataattataaaagattggaaattatacagttctgagcttattgaacctttgacccattgcagtgtcctcagacatttgtgatacattggtagtgccatttaattttaaaaatccacctctacattagagattatagtaacccctcatttacctatctggaaataagagtgggaaagataatattagagtaaatggacagactatttagagtttatgtattaataaaagagaaattgcatgtacaaacatgttattttctaggtaactaaaacctagtcctttaataaagcactgaaaaaaattttatcgtaactattttaatgagaacttttcttgaatatcttctgttttgcttcattgagcagcgcataatatctaaccaacaaatttatagtgctttgtagttcacagcatttttaccatataaaatatctcgtttagtttctccaacaaagctatgagttaggtggtattattatatccatgtttcaaggatgataaatcttagtgacccatctcattttccaaggatcacacaaccagtagtagtgaattaggaacgaaacctaagacttctgattctaaatcacaatgtaaattaacttttcttaattttcaggggtgtcgttatcacatcaatttttgctctgtttagtgatacagtgttatatgaggaacatgaaattcaaagcaccctttcttcagttgagacccagttgaagtggttaatttgcttttagaagctagactgtaagataaatacatacctttaagtattaaagctaactcaaatcactgagatacttacaccatgagaagagagtggaacctaagtcaactggtagaaacatagaaacagcaaactttgatctctctttatcctcattctgaggggcaatatgcttactgagtggaaagatgggcatacccccagcagtatttaaatcaatccctaatctatcactatctctccttttctctctatctcagcacatataggtgatttcctataaattaaatggtgtaggatgagatttcatcccatgttgaaaggtcatttcattgataaatgactaagattaccacatttctcagttttaagtttttcatgttcattgtctcctattgctactttctgttatcagaatgattacttctcattgcttttagtattctgtctttgtagggttacagaaacttcacagggaaaccagaagatcaaatatattactcactagtctcttagaatatttaatttttagtgtttaggttctgatgtcaggacaggaaaatatcttccgtgagtgatgacttccaagggtggttttcctgactaatcagaggcattattttttgtttgcttttgggttcaagactgatttttaataaataaaaaagttacatttattgatatgctagtaaatatttacatcatgcattctggataaaaacattgaaagccttgatttgacttgatgtcagacacaatagacatagtctcaagagcactgatgatagttaaattaggaagtgatgaattcttactatatattatcttttgttcttagcacagtttattttatatttataaaatttaatttatattaatggttatgtttaataaccgattagcaaaattactgaaatgtgacaataatatctctattcctgtttctttcctgctttatccttttaaaatatattatttataagtatattttaaatttataaaagctacattgtgctataaatcttgtttcttagcttttctaacattcataattgtgttttaaagatccacccatggccgggcgcagtggctcatgcctgcaatcccagcacattgggaggccaagatgggcagatcatctgaggtcaggagttcaaggcagcctggccaacatggtgaaatacaaaatacaaaaattacccgggtgtggtggtgcgagcctgtaatcccagctaccgggaggctgaggcaggagaatcacttgaacccaggaggcaaaggttgcagtgagccaagatctcaccactgcattccagccagggcaacaacagtgaaactccatctaaaaaaaaaaaagaaaaaaatccatccacattgctctacatatacccttatccatttctttcacatacatacccatgttggcctcaattccccacaatgcagcaacaaactttcttgtacttccttatgaccttaagaatgtgagagaaacttctccggtatacactggtgagggaatatgatcagcagggttttttgtttgtttttctgtgttttgctttttaacttatgcccacctttctgttggcagtcagcagccacatctgaagttatagctctctgatttagacaaggcttattcttccctttgttacaacctagtccctatagggacctgaatttgtgaccctagtctatgagattactttttaaatacagtttggttcaggatttataaaagcctaataaggctgggtgtggtggctcacacctgtaattccagcgctttgggaggctgggatgggcagatcactggagtccaggagtttgagaccagcctgggcaacatggcaaaaccccgtctctacataaaaatgtatgtactcagtagtactactcagtagtagtactgagtagctactcaggaggctgaggtgggaggattgcctaggaagtcgaggctgcagtgagccgagatcttgccactgctctcccgcctgggtgacagagtgagaccctgtctcaaaagaaaaaataagcctaataaaatgattgcacgcctggaaaacctacataggctccttcaagtcccatatatatataaagtcatccatggtatgtagttcacattgaagtcaagttgggggaaaagaaacttatttatctctttctcttttcctttattcaagtagcaattttcatttaattttattcaattcagaaatatttactgaactcctcttattaggaagcactagactggatataaagaaaacatcgtacaaggcatagaggactcagtcctgccttgcgaagggcacatagtctgactggaaagacacatgctgacagggtagactgtgttaggaataatgctcaaaatcctgaggacattgaacactcgaacaaaggattcttagcaaagcaattttacttctgcacagaggggtgcctccttggccagttgccatgagagcacacctgaacaaaggggcatgagagcctttattcctgacgcaagtcctgcccctgtaccctttccccccattggctggggttgggtcgtacaatctaaactaatcccagttggctaaacatttgatttttttagatagggtgggcacgtaaaatcaagtggagaggaaggggaaggggcgtctgtaatgagctagaaagttagtcctctttccaaataaggaaatgaatgtgagctggtactgaggtgtgcctgggcatctaacaaaggtaaaaaggaaaaaggagaaaaatcagggggtactatgaattaaagaataaaagattgatcagattatttgaagagaaacctcatcatatcccacaactggaagaaacaatttgatggcaagtttctcttcgtcgtttaccagctcaaaatctcaactatcaaaggcaagaaaaatacacacacacacacacacacacacacacacacacacacacacacacacccctctgcctttttctgtatggccaaagccttcagtccagctgaccacttcccactccagttaccatgttagcctcccaacttgtatctctgcacccttctgataaagcctccacaatgcaaaacacgaatcgtatcatatggctcttcttctctaaacacttccatctactctgtggttttagaagagaatgtaatagtcccacattacaaggtcttaataaattgcattcttgcagctctgtatcattacttgtaaacactgtagtctagatagccaggacacactgcatttcttttttaaggctcgatacctcttgccattttgcacgtagttttccttctgtctgaaatgccctttttccacctggcgcttgaatggccccttctgaaaacttcctagtcgtctttcaaaataaattcaaatgttagcttttgtgggtaacctattgacctctccaggctgagttaagctgttcccccgaggtgtcttgttgaaatcattattttttcctaaaatctctgttctaatttacttacatgtctgtgaatgcttagaggttacgaacttcagttttgtaagcttagtaactggcacaaagtctggcacagagtagcacctgaacaattatttttctggaataaataaagtaatggtttcattgaaatgattcgcattaaattaatgattagcattaaactacaacgtgtatatgaaacattccagttaggttgggttcattccattcctatttaaagagtttgtagtttctggctcttttccaactctgattcttcagactagaaatgcaatttctgctaatgtatttattttaaccaaacccgacatcaatcaagttatttgtattcctcataaggtaagcataggaatttacagtgatacaaaaacgcagctattatctcttataggcactggtaaagcttttgtgactagtgctactatactggtaaggtattgctgcttgtaatgaactaaatatttcagtggcttaacacaataggagttcttttcttgctcacatgacaacccagcgtatgttttcctagtcaagcagctttcttacatatgttattgcagaaacctaggtcctgttcatcttcttcctctgcctgccattcccttggtagcttttctctgctcgggtttcgcaagaggatgaaatcctattgaaaatgatctgagggtctattatgttctcaagaatggtacatatctagtctatgataaatgctcaggtaactgattaggtgtaatagatatcttaggattttgtcatgaacaatcagcatcaacaccacctggaaaattgttaaaaatgcaaattattgggctccacccagtatctactaaatccagaactccggggctaccatgcagcaattagcaaggtctccaggtgattctgttgatcctaaagtatgagaacaactgccctagggcgttaggacttaattctctcctcagtaagttgtaaagatttgccgtaggacctaagagtcttctgcttccagcaatagaaaggaaaaaaaatgtggaaacctcactaaatttttcaaagcctcagccccaaactgacaaacaacacttctgctcacattctgctggctataaattatcgtatagctagctgcccagtgaagtggaaccagctcaggacggcctactgttatattgccaggcattttttgagccacttgatgttatcttcttggtaatttaaatttaaccgtggtaggaatatttacaccacagaaattggcaaacactaaaaacaaggtgtttttaaacaccctgagatcagagatccagttgatatacatctaccagcacaccactggccatatacaggcttgccttatgccacggggagctctgcagctgaagtagcccttcaaacttgtcctgctttgagccaaattaggcctctatactttcaccttcatcagtcactgaatgagggctgcctggggaaaggcatgaacttggacaaggcagctctctgcagctcaggcagtccctgaagggactgacagttgaagaatgtctactgacatcatttccatcatctagaacaagagtctttctttgaagggggctctgagtagcatattcccgtgtccactgcagcccctccctttaagagactctgatataattgactgggggtgagccagtacattaggattttcctaaagttatctggataattttagtatgcaaccacaatagatactcttcaagaattaagctagttgctgagagggaactgttttttgttggtttgttttcactaatgtttgcactctacttcctttaaataaaattatgcctggagaaagggtttttgtatggagcaattgataaatatttgtagggtggttggctaaaataattataattcctttaaaagaaattctacccactaaagttaatttagaagtaaaatataatagaaatccaataatatattcaccaaatggattaagatgttcatgaattatcttcaaagtgttaatcgaataagtaatgtgtatgcttttctgttaaagaggaagttagaagatctgagctctgagtggaaggcggtaaaccgtttacttcaagagctgagggcaaagcagcctgacctagctcctggactgaccactattggagcctgtaagtatactggatcccattctctttggctctagctatttgttcaaaagtgcaactatgaagtgatgactgggtgagagagaaaatttgtttcaattctaaagatagagataaacctttgtgttattgactgtgcaaaaagtcttagagtacattccttggaaattgactctgattcaaagtgttgcatgacaacgggatatggggagtgttctctggagatacacccacaaggaagagaagagcacaagggagattgtgggagagtctgaaatgtgatttgtctgcagcagaggcctaagccagtctcgcaggagccctacatctgggctggctgtgcagagctgtcctgaattgcaggcagtgggcctggcccttgtattcctgatccagccagccattggccaggggctggctgctgcctgagagtggaaggacaacttggacaagttttctgaggccgaaggcaattcttagtaaggaacaccattaacaaccaatattcctagcatccagggatgtgtgcattgttcctgaagagggacaagtatgtctacaaaaatcacagaaaccacagaaacacacacagtcctactagcacctctccctgtcccatttgcaaacaatttaagagctctcccatttttagttcaagaaaaagaaaaatggattgggaggaccacaagctgacttgggggaggaatatttcctcatttagctgtagttttaacttttgttttcactgcatattttcagtctattttattttctttcctcttcagttgttgatagaaggtattcataaattctcatggcaatgttaatgctggctttgactctcaggggaaagaggccagaaaacttctttgctgtaccattccataattaggcagaactaaaaacatctttgggtgttgttttttgtttttgtttttttttttgccttgtctgcttttcaaagatcaaatgattgaagcattaaagcatggtgactggttcttcaggtaaagttgatttttattttatgtcaagtagaaaaatactgaactggaagaatcacagctggggtagcacaatcataattcattagaaggcataaatagtgcttggattaaaagaagccctacaatctggggacagtgcatctcatgtgccctctgggattactcggcagtcatcagagttagatttaacgactttggagacttaagcattatggttttttttttttgtcaatctgggacactgaaattgctgtatcagggttatactcaactgtgtcaggtttatttgtttttatgagctgtaatttttggttccctcagcgcatatgcatagtttgttcctatgttatcatttattggtgtctgttttctggctgtctctggtaggttcagcctcagactctgtaactccatgaagagattatgttccaatgatgttttataagtttgttaaactctgaactcatgagtttatgtcccatataagccacgttacacatggtaggaaggctccaaaaccagggcgccgaaatccatttaacgtgtaacttacctaaatgtaacaatgtttataagaaaaatacattggaagttccagttttgacttccagcaacatatataattcatccactttatttattaacttccatgtgttgagcatcatactggtgctgcgagtacagcatagaataaaagtctctcctttcataaaacatatattgtaattgaaagagaaagacaataaactaatgaagaaaatatatactgtctcaataattataagtgctgtagagtgtagtctacagattgatgtcaatgggtatttgttagacacacagaatctgaggcccctatcctagacccactgaatcacaatctgcattttaatagaatccccaggtgaatcctgtgcacactgacatttgagaaacaccattacagagaacaactaagcagggagatgggatgagggtattattgtctatagtgtggtcagggaagcttgtctgttaagagaacatcagaaaactgatgtaagtgaggaagtgagcctggtgtatttctgggaaaattattccaggcagggagagaaaagactgagcaacgatactgaagtaggaacaagatgacggaatattaaggagatcagtgagactagaggagtgggtcaggggaagtgtgatggaagccatgagagatactcatctttcatagcactgccctacttccttctccccaacatgagggtctcatcaccccccaccactcttgtcttctcctatgtcctccacattgctgccagtatggagagtctgggaatgccctcagctcaaagctgtttggtgatagctggcagagttgtggtagtagctaaaaaagaattaagggaaagaggaattttctcaaaagcaggtgcttttcatcctctttagcaaaccgaaacagatctgagcattaagtcaagatgttaaatacacaaatgttgaatgaaaaaaaaaacaaaaggtagtcatttaaattcagagctgcttttattaaaataagattttcttttttctttactgtggtagttcaaatatcagaataaagaattgtttctattcccgacttcctgacttgcaggaagttaatcagaaataaatgcaatataaaaaaagaaaatctaatttgtattatgcttcttgtatatgtttattatttcatgtactgtattacaatgtaatagaatttataattcattatagcagattgtttccattgcattcctactattaaatatgtagaagctacacatatacttgtagctttaacatatatgtctttatcctcaaaataactgcaaagaacatatagataatttttaaagattaaggagcctgaggtttagaggggagatagctagattaaggccacacagctagaaagcaagcaagcaagggtttcagtccacatgtcaagctccacagcctgtgttttgttttgtggctgtgctttacactatctctctgtccaagaacctaatggaaaattacagatacagatgcagctggccagcagttaatataatttaactcaatcttaaatttatctggagtaaaagtgatacaagtttccgtgttttttcttttctttctttcttttttctttgtgtgtgtgtgtgtgtgtgtgtgtgtgacagaatcttgctctgttgcccaggctggagtgcagtggtgcgatctcggtttactacaacctctgcctttcaggttcaagcgattctcctgcctcagcctcccaagtagctgggatacaggtgcgcaccaccatgcccagctaatttttgtagttttagtaaagacggggttgctccatgttgatcaggctggtcttaaactcctgacctcaagtgatccgcctgcctcagcctctcaaagtgctgggattacaggcatgagccaccttgactggcctgtttctgtgttttttctacttaagaagtagaaaaaattggttcactctatttgaatttcttagaaccatagaaatccaaacttggaataattattgcaattattatctagttgagtattcttcttttatagatgtagaagctgaggcctaaagttgcttgttttgttttatgaacactaaaccaaactaccttgtggctgcttacttaaattataaattataatggggtggccttgcctgagctgtataaattgttttaattatcaggacaaatcaacatactggaaaaaaaaagcaaaacttgcaattgttgttgcttagacacctgtccatatcagtttctattgttgcatagaagcaccccaaaacttaacagttcaaaacgagtgatttattgctcataattctgtgtgtctgaagtttgctctgtgattagctggatagttattctgatggtcttgcttggtgttacttatgtggatgcagttatctagcaagtgaacaggagctagatggtctaaaatgcactctctcagatatctgacagctggctgttggttgcagaaccttgattcttcataaggccactcatcatcctgtaggctagattaggcttcattacatggtattctcagggcagttttccaagagagggcgggtggaagctacaagaccttctgatgcctaggctttgaaacgtgtaggttacttctgctaagttatattggtcaaagcacctcaaaagatcagcccagattcaagagatgaggaaattacttcatctcgtgaaaggaggagatgccacatcgcatatcaaaggggtatgcatattggggatagaaggttttattgtcaccgtatttatacacaaatcactacattggggaaaaggagggaaactggagatcaaaagtgttggtcttaatccaacttaattctcaaaaattaccatgcgttagaaccacccagttcttcgcaaagtatagattactgggcttcaaccccagagtttctgatttactagctctggggtgagacctgcatctctctctctctctttttttttgagactgagtcttgctctgtcacccaggctggagtgcagtggtgcaatctcggctcacagcaacctctgcctcctgggttgaagcggttctcctgcctcagcctcctgagtagctaggattataggcacccgccaccacgcctggctaatttttgtatttttagtagagacagggtttcaccatgttggtcaggctggtctcgaactcctgacctcaggtgatccacctgcctcagcctcccatagtgctgggattacaggcgtgagccactgtgcccagccaagacttgcatctctgaaaagttcctaggttatgctgatgctggcctatgctttgagaactactaccacagacatacagtgagtggggaagaataaattcatcccttctgctgtgtgcagcaaggagtgggattccaatgagatccagtgctgtgaatgctaaagggaaatccatcttattttagcacctctactccccatctccccaccccgaggatgttatagcttagaagttcaaggagatggacaacacactaaaccaggcagtatttgccctgcagagctgttcagtgttcctggatgagacctctgagaagaaaagccataagttcctctagagactttcacaatcatttaggtagacaggactttgcatgggtctgaaggcttgcatggcagatggaggcaaagagccagcaaatctggttgtaaatgtcaatgtgaatcctttcttatccacaagctgctgggcctgagaacattaatgttctacaatacccgatttagcatttttgaaagaaattgcatatagacatgcttaatgtgaagactccaaatcaggatatttgattcaaatgtctcttggtaataactatggaatgaataacccattgtatatggacatatagaagagccagttaacagagttttctttttttttttttttttttttttttttttttttgagacggagtctcactctgtcgcccaggctggagtgcagtggcgcgatctcggctcactgcaagctccgcctcccgggttcacgccattctcctgcctcagcctcccccgtagctgggactacaggcgcccgccaccacgcccggctaatttttttgtgttttttagtagagacggggtttcactgtgttagccaggatggtctcgatctcctgacctcgtgatccgcccgcctcggccttccaaagtgctgggattacaggcgtgagccaccgcgcccggcccagagttttctagttgattaaacactggtaaaatcatctcttcctgtaattaagtttggagagagcaagtctcaagtgtaattaggaaagcacagtattggaggtcaagaagcctaaattctgatatctcagttgtgctaccaactatataagggatcaacagactgtttctgcaaaggaccgatactagatattttctgctttatgggtcatgtggtcaactctgtcattgtatactaaaagccacagacaatacctaaataaagggacatggctgtgctccagtgacactttatttacagaaacgaggcaggtaagatagatttgacccttagtgggctacccatttccccttagcactcagccttcctataaaccatgaagcgtctaactacaagtacctgtgagtcttcctgagtcctttctctgcctgtaggagtagctctcccacttgcagagcaggctggaagctggggaggagattatctctggaatagcacttaaccaatggacaaaagctgggggataaaggtgttggtcttcatagttttcatactgctatgaagaaatacccgagactggataatttatacaggaaaaagaagtttaatggactcacagttccacatggctggagaggcctcacaatcatggcagaaggcgaaggaagagcagaggcacttcttacatgacagcaggcaagagagcatgtgcagggaaactgctctttataaaaccatcagatctcatgagacttattcactatcaggagaacagcacaggaaaaccccacccccatgattcagttacctcccacatggtccctcccacaacacgtggggattattggagttacaattcaagatgagatttgggtgagaacacagccaaaccatatcaataaatatcccaccttcttctccccttgggtaggacacctccaatgcatgttccacactaaaaatctccagtgaattgggcagttgaccacaatgataagcatacttattagcatgcctcgtataggcttccttccgatgtgtaggctttcttcccattttggcagaatctggacccaaccccacatctcctgagtttgatttcagtcctcttcagtattctcatatatctcaactttgttccctgctgagatacaactgacagatatatatgtatcttcagctctgcagctctatcttctcttctaccatggctttctgggatcagctcccaattgaattatttgtatttaaatccttgtctcagggtctacttctgagcaaacctaaattaatacaagtcttagaattagtgccacagttataccttttgagtaagttatgttgcaattcccattttatagatgagataaccaagggtcagaaaggttaaataatttgtccaaggttacagagctagtcagtgacagagtgggtattcaaaaataagtctctatgattccagagcttatgctattaatcagtgcaccatgtatcaagcagtgatttagttatcttcatttgaattttttgaagtctctatttaaattgaatatcaaatcctcacatataaggttatttatacctttttatttgttttatttatttatttatttttgcttaacttttttttattatactttaagttttagggtacatgtgcacaatgtgcaggtctgttacatatatatacatgtgccatgttggtgtgctgcacccattaactcgtcattgaacattaggtatatctcctaatgctatccctcccccctccccccaccccacagcaggccccagtgtgtgatgttccccttcctgtgaccatgtgttctcattgttcaattcccacctgtgagtgagaatatgcggtgtttggttttttgtccttgcgatagtttgctgagaatgatggtttacagcttcatccatatccctacaaaggacatgaactcatcattttttatggctgcatagtattccatggtgatttatacattttaatttgaacttcactcacctctacaaagttaaataaagcattccatttccatttcaataatactttaaatatctaggcagttaaagcatgaggttacttggcacttaaatgtactcttgtcatactacttttgttggcttaaattgcaaaaaaaaaaaatggttaatttattgtgacaataccctacatttatctgcagtgatcattttttttgtgaaaatggccttcgtttatctgcagcaaaggaaaaagaggatggcaattagttcttgcattcttattcctctcttgggtcctgatccttctcattaatagaaacatggcaggggaggggtatataacccacaccctttcctgttgtggttatgtttccactgttgattctgcttcaggtgaacctttaggattaggcaaataaatttccgtgaggccaaatctttttcttcctcattaacagatgatttctctgctaaaaacacttacgacatggctatactattgccggttttatagttacaggctctaaaccttgaaaacttcctcaaagtctaatacgtcaggagcaagcttttgtacaaaaaatgtgaagacccttaatcagttccaataacaaaataaatccattttaaaccctatcccaagatactgcaaggccttggagcagctggagagactccttaactcttgacattaattaattaatttaaaaattcatatttgtatgtatcagtgaggtaagagtgcttgaaatataatgagatgtgtcacactgtagaaaggggagtgacaacagaaagccctggctggtgaggccccagcacttctcacactcatcagaaggaagtctttccatgaaggcagtagggggtccctggtcccaggccaggtccttcaacaatgctcactggttaacaggaaaggcactacagtggcatcattgttaacatccaagacagtgatagaatgtgaaacttctactgtttagtatttagtattcagcatttagatgttaattatccattttgtgatgaagttccctttcttctccctctcttaaccttttggtagttttattgcatggttaccatttccagttagggttgtgctttggggtctgaactgatgaaggaagagaaactctagttcatcatttctaggaaaaagagaaggctaacatcaattctgatgattagagattttttgattacctatgtcctgcattttaacagaaataaaatgttaattacagtaaacttactttaaccttcttatgctatttaacactcttcaagaaaggacttttgcttgaaatcactacagagtataccataatcttgactgtcatactctgaccaagaaaccagaactatttaggcatatttatgagagtaagtaccctaccgctcaaaatggaaggcttcaacatgtattcctaatatttcctaaaacttcactgaatagttttaaaattgaatataactttaccttcagagagaaacaagatttcgaaaggaaattgtagcagttttgtacttcaattgtcgattttaagattgtggtctgaaaagtatttgaacagtcattctttcttttccactatctcaggaaaggctctcattctattagaagcaatcttagaagcgtaactgccaactctcttcttaaaaagtgaagagcagatggagttctaccaatctgctatacttgacagtttttcaactacctaacctaagttccagttactgtctaaattatttttattcgaataggaaaaatacatttatgcttactgtacatttcgacagtgttcattctttgaggtctgttatttaatctccttcccacttttcttttctatcttaaatcagatgagtccccatggtctggcaacaaaacagctgtttctcaaatttttaacgtctctgtggccctcctcctacccttccaagtgttttccatactatttttctgttgtgggcttcagaattggatgctgttccataattactggtcttcccatgactctgtcacatcataaagtctatatatacccttttcctacgtttacatgccaaataccaggtgtgtctagctttaattcaatgactagcatatggtaggtattgcactaatattttttggtcaagtgaacatatattttacagatagatcaaatacatcaaccttcccatgtaataataataataccaagaagattaaatgatcgcgtgcttgaccagctgtttagtggcagaatctggacccaaccccacatctcctgagtttaatttcagtgctcttcagcattcttatatatctcaactttgttccctgctgagacacagctgacagatatatatatatatcttcacaatctcagtagtaagccctatttttttaagattacagtgctgatcaaagagggatattctatggcattgatgcaaatcttccaggccagatataacccctatctccttaaaccctcattcttgactgtgtcttgaaatcaaatttgagaacctctgctttacatgctaccttcctcttaaaattcataaggtttattccttctctcatcttcagtatttttatgaaaatatgttttactcttatttccaaagtgcttgccagcccatgctgagttcattagacaaacaatctaggtatcctaatatttaggtaaaattgctagcagcactaactataccagtacccacttaaattgcaatataaacctacaataggaaaaaaaaagtcaaaattatactactttcaattcctacttctggaataattatcacaccttcaaaaaaactcataattgttctccaatattaaaaaccaggaactaaattacatcactatatatatatagctatatagacatataactgtatatagtttatatatatattacatgtcactatatatggttatatatacagatagctatatctctatatagtttttatataggaaactatatatataaactcatatatatttatatataaactcatatatatataaactcatatatatttatatataaactcatatatatttatatataaactcatatatatataagagattttatatgtatatatgagagacaatattgaaataaaacaaactagccaatctccaatgtcccttcattttcccaggactcttctttattctcaaagaaatgtatgaatacacaatataaataaatgttctataatgttcattatggattataatagttttcttgtcatactgaagtgaatgggaattgtttcttcgattattagcatacttttcataactatgtgatttggtgataggcacttttgcttactaagttcagcatgatcaaaacagaactcctattatttttattgttgattcttatttctttaaggtaaaatatgcccttttcctttgaacctgcacactgtttaacaaataagcacataactcaggattgaattgtacacttcgatttgagcttttttttcaaggtcaggacccagtttcacaagaagttttattttttccaatacaactgacatccactcccaccagctgaaagacaagaaaaacttgtctaataaagctttcagattcaatttgctgcctgcatacagcttgaggaatctctggaggtcactcacagcatgtgttgcaaccccaacagggagaagtaatgaaaagattctagttaaaaagctgacactgccccttccaacctctttgaatgtgaatataataagccagtttacagacgcaaatctctatgattctggggatttccatcttgatctctgactccaaggaacatttgaatgcatggatttgtatccattatctgggtgaataaatgcttcatattgaaaaaaggggtgctttaacaacataagtctgatgtaaatcaggcaaaacaacattgtcacttcatgtttaactctcctggagggtctctaaggtctcacagtttggttctattccagtaatatataggcctatcatagccattttcaaaaataatacctgctttcatttcgattattccccctagcttttgcattgacccgaacatacctaatatttatcttagggctaacacgcattaatgccttgctctgtaccaggcattttgccaagtattctttgtgcatttttctgtttaatcttacagcagccttatgaaataggtactacattattattatttttcaccatgagaggaaatgaaagcctagagagaatggttatccaaaaacacccagctactaagtgggcacagcatggccttgaacctgagtctttataaagttcatgcctgtcttttacctttatgttaaacatactgaatcttggtcatgcagtctatgaatgaagactccatatactctaggaccaattctaccatattgtgcatgcttttgtacatattttccaaatgaaattaaacaacaatactctctcttcccctttcttttccgttttgcatgacatctaaatcttttattaaatctccgtgggtggaattgggccttaagtagtagtacctttgaagcttaatactataacctcagagttacggaagtggtttcaatatgaagaaatatatacgttcttttcttttcttttcttttctttttttggctcctctagaatagaaggcaatcaggagagaaaaagacattaagatgataggcttgattctcccacagtgttactacttagctttatttattctcccacatctgtaactgtcaattcaaggtcaaaaagccagtacagcagcagaattacaaaaagtagatctggaaaatctatagggtaccatagtccagcaccctgctgcaagtcaaaatcaattaaataaatatgtttaaacagcacttcatttaatcttaagggcaccacgactcccttggaaaattcttttttgtgttcagacctgattctctgaaagtattttctagtgttttctttgttcggtggctgtggtgaataagtggacccaattgcctacagcatgaaatcgtagaaatgaatatgggctggaacttcaatcaatcacacaaaccagaaacatagagttcatcacctcttctggaaagcgtccccttcggccgtcaaaagggtagagtttcctccaacatatgttcatacttccctttgcctcccatctgcaatttcaaccagtctgttgctctcgccctttttaggcttcacataccggatttcttcttaggagctcacttgaaaaaagggttgtatgctttaaaaatactaaaagtcactggactagatgataataaaatttctgtaaaataaaaagggagttaacagaggtgttaccacttatcataatggatattgttgacctttcctctagccagtgtcccacttaagcatgcttcttggctggaatttatttttctcatctggataaatctgaagcattatagtaaaacccagtgtgagcaaggccatggatgcaagtggattgagatgaatgagtggatagacctgcgtgggcagaaataatgaggtcagcaataagccataccaagggatgcacactcaaggaataaattggaggtagcagaataactgaacaaatgatacatttgatcagactgtcacatgaatatcaactgaaacaagttatgactgtagttagtgaaccctagagtgaagaaaacaaaatattgaaatccatctgatcaaaaaataataaaattgtttacatgtatatattatctaaaatttcccttaagaatgaagattataaattcccgcagttgaggaaactgaataagaggagaatcaggacagaatcttttctcttcgtattcctagtccatttttcttctaactacagtagtgagaacaagaatttattcaccaaatcataatacattgcaattaggggatgccatttgaatcttggaagacacgatttgaggcaaataaaaaatccatatttataaagtcaattattggtttatataatttactgtttcagcgggaggtataggttagtaatgtaagtcacttcaagaaggttttggtcgaagttttgccaattttttctgtaaaaagccagatagtaaatattttgggttttacaagccagaagatctttgttgaagttactcaactctgctaatgaggtgcaaagcagccataggcagtttgtaaatgcataagtgtggctgtgttccaataaaagtgtgtttgcaagaacaggcagttggttggatttggcccacaagccgtagttcactgacccctgttttagataaatactagtcaatagattccttgtagctaataaagggaatatagattgtttaatgtgtttccctaatcttcttaaggcttcctccaggggaaaaaatatttcttatcatcagcagtgttattaatgcttactcagaacaaagaataccacttacttagcatagaatggacatttataaagccactcatggaaagaataaagagatgtgaaatacctggtacaactcttaagagtgttccactatcatttgaaaaaatgatgagtagtagttatataaaaggactcgagcctaaaacatttgttctcactttggataacgttttcctatctcagcatcaaaaaatacaaagaaaggggataactaggtcttagattttctaaattctcatgactataagtcccatatatttagatattgaagtacccttaaatatacctaagtagaagtaataatttcgatattatgggaaatctaattactgctcatagttctcgagattaaaatgttatacaccacatctcagctttctttgaaacttgaaatggcatacttgtacaaaggtagaatggtctcccaaagcagcgtcatagattagcagaaaagagctatgataatgccacttcaactgactatcatttaaataatgaattagttaggaagagttaaattatatagttacaggcagcaggagatgtcaccatcagggggataagaagccattttccagtacactatttgacttaactggtgcagttccttctttaactgtaggttactcatttgtatccttaatttatcaatatactaatctgacaaataatttattaaggattactgtgtgccctcctgtgtgttagattctagggatacaatatggatcaagataagcgtgattcctagactcctagaaagtaagaaaactaaataactgtacgtgacaaatactaggatgtagaatactagggaagaatcaggaagaatcacctcacccagtctggagtattgcaacagagcgatgtcagaggaaaaattctggaaaaaaaaaaaaaaaaggaaatttgaagatgagacttgaaggataagtaggtgtacctaggcaaacaagtaggggagagtgttccaggcaagagaaacaagtaacagttggaggcaaaatggagcctagcacgttttaaaaatatcagtatggctgaagcactgagttggggttgggaatgggtgaggagcgatgtgtcagggaggacattccagatgatgctggaaatgcatgcatgttcgcaaactgcattttaagacatgttagagaaatcaaacacattttatttgaagggtaattgaaagccactgaagcattgtagagagactagtgacatgagcatatttgggttttagagggattactctggctgaagaataggtaactgattggataagagcaactttggaggctattccagtggttcaggtgatagataataatgacctaaactaaagaagtaataaagggaatggagacaaagtagacagattcaagtgatacttggcacgtggaaacaacaggccctggtaactgattggacataaaatggagagatacagagaacgcgaatagaacacccaggcatttggcttgataaaccgagtagaccgtggtagaaattactaaactatggagtattttagggttcaggggaactgtgagttcaattttagacatctagttttgcaaggccactgaggtaactgagcatatgagtcaggagagaagtttaggctaaaaatatggatgccagagttaaccagcgttatgataaaacaaagctgaagtctcgagggtaagaacacctaaacatctaggctggagaaggcagcaggtaaaaagtaaaaggagaggccaggcacggtggctcacgcctgtaatcccaacactttggggggccgaggtgggtggatcacctgaggtcgggagtttgagaccagcctgaccaacatggagaaaccgtgtctctactaaaaatacaaaatcagccaggcatggtggcgcatgcctgtaatcccagctactcgggaggctgaggcaggagaatcgcttgaacccaggaggtggaggttgcggtgagccaagattgtgccattgcgctccagcctgggcaacaagagtgaaactccgtctcaaaaaataaaaagaaagagagagagagagagagagagagaaacagagaaagagagagaggaagacaaagaaaggaaggaagggagggagggagggagggagggagggaaagaaaagaaaaggagaaaaattcaggagaatggttacttccagggagatggaggcgattgtgctgtggggaacacaagggtggggtcaaggtattagcagtattctatttcttgattggggttgtatttacataaagtgttgctttataattattcttcacactttatgtgtacgttctatgtaatcatctatagataagacagatttcactgtaaaagaaaataaaagcttccaaaagattatcatcacaattgtaacagattcccctggtgcctggagtcacacgccattttcctgcactgcagttgcagctgcagtggacagccctgtgtgagttcagacttgcctttagctgacagcatcccatgtcaagggaatggctcccatttttctactttctatctaagggacttctctgacatcccaggagcccacagattttgtgagctttctcacccttgaagttttagtgagtgagcaaccttcaaccaatggagatgggagcccatggatatatttttaaccactattccttccgggggcaaggggaattctctgtgattctcaggaacatacaaaagttctgtcaaaatacagtccccatggtccataagcattaccttgatgataatacatttgattggcatttcctccccctctgtctcactcttttggtttttcattcttgcttcctagggatcagcttccaaatgagctatctgtacccaagtcctcatccaggccctgttttcaggggacccaaagacaacaataagaaaaatggaactgaaagaggagaagactttaaggcatgaaaaaagttcctctgtattccatactgcatatttaactgcctactcaacagttccacttagatgtctcaaaaataatctcatgatcttttactgctatgaaatgcatgaccttcccctgatatattcctttcttcaggttttgtagcaccacttagctatccagtaacaaaatcttgggggtcattcttaaaaccttcccacctcacccctgctggacatccaccactaagttcagttgatttttttgctcctaaatatttcttggttcagctttcatttttagatttatcctgcatacccctgtacaatctcatcatctctttcctggactgttacagtagtcttatattaggatgatcatagtcttgatttgcctagagaaaacatgctttatgtcattgcctcagagtgactaatagtcccacctttcacttgtaacactatgcaggttattgggttaaataatactgtcatccaaacctaatctctcctcattcatttcttctctcctatgcatcttagctgtgtgaaaattcaaaatataaatttgatgacagacagaactctgtttaaaatgctccagtaccttaccatttatctcaaaataaaaatttcaaaaaaagaaatgatatcccacaggatcttgtatagtgtgaccctttccatttcatcatccttataccagatactgtgaactacttactctcttatctccacattgacctccctcctagttttgttttgcttatgaaagtgcttattttctgttttttaaagccattgcacatattggtctctctgattgagacactatccttttgaatttttgacctcatacctactcacttttcaggtctcagctcaaatgttatactcaggaaagacgctccttacctcccaaactaggttagtgtaaatggcactatttatactcctcttccagagcacacaccaaatcttatatttatttgtgggacaatttgaattcatgttgttccccctactcaattgtgagcttcttgaggacatactctgcctcctccttacctagctttattgaagtataattgagaaataaaaactgtatgtattcaaggtatacaacatgatgattttatatgactatattgtgagatgattaccacaatcaaattaattaatacatctagcacaagaaatagttactattgtgtgtgtgttgggggggggggatgaggacacttaagatccagtcttgtagcaaatttcaagtaaacagtaaagtattattaactatagtaaccataatgtacattagatccccagacatcttataactgaaagtttgtgccctttgaccaatgatatggtttggctgtgtccccacccaaatctcaccttgaattgtaatccctgtaattcccatgtgttgtgggagggacccagggggaagtaattgaatcatgggtttgtttccccccatgctgttgtcgtgatagtgaatgagttctcatgagatctgatggttttataagcatctggcatttcccttgctggcactcattctctctcctatcaccctgtgaaaaggtgccttcctccatgattgtaagtttccggaggcctctgaagccatgcggaactgtgagtctattaaacctcttttctttataaattacccggtcttgggtatttcttcatagcagcatgagaacggactaatacagtaaattggtactgcagagagtggggtattgctgtaaatatacctgaaaatgtggaagtgacttggaactgggtaagaggcacaggttggaacagtttggagggctagaagatgacaggaaaatgtgggaaaatttgaaacttcctagagacttgttgaatggttttgaccaaaatgccgatggtgatgtggacgatgaagtccaggctgaggtggtctcagatggagattaggaacttcttgggaactggagcaaaggacactgttgctaagctttagcaaagagactggcagcattttcccctggcctagagatctgtggaaatttgaacttgagagagatgatctgaaattggaactttgttttaaagggaagcagagcatcaaagtttggaaaatctgcagcctaacaatgtgatagaaaagaaaaacccattttctgagaaatacaagctggctgcagaactttgcttaagtaaaggagccaaatgttaagcgccaagacaatggggaagatgtctccagggcatgtcagaggtcttaatggcagcccctcccatcacaagcccagaggcctaaaaggaaaacatggtttcacgggccaggcacagggccgtgctgctttgtggagtctcaggacttcgtgccctgcataccagctgtggctcaaagaagccaaagtacagctcaggctgttgcttcagagggtgcaggccttagtggcttacatgtggtgttgggcctggggttggacagaagtcaagaattgaggtttgcaacctctgcctagaattcagaggatgtatggaaaagcctaggtgtccaggcagaagtttgctgcaggggcagggccctcatggaaaacctctctgctgggacagtgcagaaggaaaatgtggggtcggagctccacacagagtccccactggggcactgcctagtggagctgtgagaagaggaccaccatcatccaaaccccagaatagtcagaaatgctgatagtttgaaccatgcatctagaaaagctgcagatactcagtgctagccatgatagcagctgggagggggctgtaccctgcaaagccacaagggcagagctgcccaaggccatgggagcccacctcttgcatcagcatgacctggatgtgagacatgtagtcaaaggagatcatttgggcagttcaaagtgtaatgactgccctattggatttaagacttgcatgtggcctgtaacccctttattttggccaatttctcccattcggaacaggtgtatttacccaatgcctgtaccccccattgtatcctggaagtaactaacttgttttggattttcaggctcataggcggatgggacttgctttgccttagatgaaactttggacttggacttttgggttaatgttggaatgagttaagactttgggtgactgttgggaaggcattattgtgttttgaaatgtgatgacatgagatttgggaggggccaggagcagaatgatatgttttggctgtgtccccacccaaatctcaccttgaattgtaatctccaaaatccccaggtgtcatgggagggacccagtgagaggtaattgaatcatggaggcagtttcccccatgctattctcatgatagtgggtgatttcacatgagatctgatggttttataagtgtctggcgtttcccctgctggcactcattctccctcctgccaccctgtgaagaggtgccttctgccatgattgtaagtttcctgaggcctccccagccatgcagaatggtgaatcaattaaaactgttttcttcataaattacccagtctcgggtatttcttcatagcagcatgagaacagactaatacaaccaacatcccctcttgtcgattttcattgaatccccattacctgggaatgaatgaggaaggcagaaatagaaatcagcgtattgttcaatatagaaatcctgaagttacacaagataattacgagcaagactcagtacagagaaggaacccttgagctggggatcagagtcttctggaaacaaggagtaccaaaggggagtgaaaaagagaagtggagaatgagtagtagcagtaaaagaggaagtatgtaaagaaatggaaataaagatgaaataaactgtcatcttgttccagagacaaagctagctaggggagctaaggaaatttagagggataaaaagtctcatccaaaccttcataatgagctaagggctagtttttcatagaccctagcccaacttgcaaccctctcactctcttacttttttcctggctctgttttgctttactgcctttcatataatctaaaatgatgttaaatgtatatttcctgtctcttttctatatcacaatataaattccatgaggccattgcctgtgccacatttaccactgtactcccagtgcctagaatggtgcccagatcaagtagactcccagagtgtctgttgtcaaatgattctcagtccagtgatgtttgcactacatggtgctgccacttttttttttttttttacttcattccatttggaatttggatcattttgccaactttagggtttattcctctttatttcccctgtgtttgctgaatatctgactatctatttttctcagctctcttctcctcacactttgcctccaacttcctctctgctacaaattatacttagcacaagactggagccacttttcattgattttgatgtcagtgcttgagtgacaactccatgtggagaactttcaacctcctgctgtctcgttgtttgctttgaaaaaaaaaaatactcatcttcttcctgaacccactgggtaaatttatgctcacaaaaaagacaaaacttctagaacaaaaactgtatgagcttcaaaagtattagttttcccttgattttgagactcaaaagtaccatagaaattttaaaagggggatgaagtaattttgtcattcaacccgatatattttacaatttgaatgtcagaaccatgaaatgtcttttcagtgtactatcatcctcactatttccacctataaaagaaaagcaaaaatattgtttgagaacaaaaaaatattgcagtagcggaaaaattcactttaagtctttttttggaggttgccacatcacgcctgtcttcagctcctctcactgaagattctttgttttcttgaaaccagttggtcacttccaattcttaccacctataaatcttcctggttctttatatttcactttatatgtcccttatctcctctgatttttgttccagtctttcattttttacattctttgtcatcctatatgtcagaaagaatctgccactccaaattccttaatatatttatctaccagtgtttatttgcctgtcacatgtactcttcagtaatccattgacttgaaaactttctactctgtctttcttactatagtttgcttcttgagttcaaattattaatatattaggtcaagtaattctatttttatgcacattttacctaacattcttggtaaatataattgttttttaaattgcatcacatggtgagtattaatttaagacgtaattagtattaatctactggacaagattttatttattaactgttttgccctttgctagggttctgtaatctcaccctcagtgcctttaaatagtcttacccaaggatcacctatccctcttcaatttaaattctctattgtgttagtttctgagattgcacattctctggtttggtttggtttttcagtgatctctgtggtcacttccaaccatttctacttagtttacttttttccctgttagccctcttcagtgttaatatcacctggaagttaacccattcctagtctgcattgctctatggccagcatcttggctgattggccatcacctatcctgtacttattgtcaatttttttaaattttttattgtggcaaacagcacataacggaaaatttaccatctgtctttgttcatgtatgttgctataaaggaatgccagagactgggcaatttataaagaatggaaggtttatttggctcatggttctgcaggctgtacaaaaaagcatggcaccactaccaacttctcatgagggcctcaggcttcttccattcatggtgaagggcaaaggggagctggtgtgtagagatcacatggttagagagcataaacaagagagagaggggaagtgccaggctgttatttggcaactagctcttgcagaacctaacagaatgagcagtcactcaacctgcccccaggaagggcattaagccattcaagaaggatccacccccatgaccccacacttcccgttaagccccacctccaatattgaggatcaaatttcaacatgagatttggaggggacaacatctgaactatagcattatcttaattcaaataattttactaccaattccatttattagagaatctaagattaagactactgaaactatgccaatgattatctctagttcaggcttctctcttcaattccaaactcatattttcacctgctgacaagctaccacgtagatgttccacaggtatttctaactcaggatatgtaaaattgatgttatcattattttctgaaaatctattcctcttactatattccctatttttgtgaatgacacaatctaatggactggccatgttaaaaatcaggaagtttttctggcactttctttattccttaatattaagccccacgataaattaccaatcctttcgatcttgttaagacaaataagcttgaaatttcttatctcttatttagcactgcaattttgttttctcattcattcagatagcatcttctacaaaacctcttcactagtttttctgtctctcagctcatcttgtacactgcaaatccattaaaactacactttttaacatgccaatcataatgtattagtaaaggttgtataatagttctctttctcttctaggataaaagctaaatttttcagcttggtacacaaggccgttcatggatttggtacctactagtctatctagggtatttcctacatcttccctcctctctcttgaaaaatcaagtaatactaaactatttgtaactccctaatcaccaattgctgcctttatactttaacatatattcttccttttgctagaaatacatttgtcataataggctctttggtaaacttaccattacattctcagtttataatattatttgtgtaagtaccttttttcctacttagtcctccaggggaatgcatgtgcttctctctccatattatcattttaaaatttactcctatttcagcaagtatcataatattttactgagattaattgttggcatatttatgttaccctggtgacatatttaatagttaagatgctttgggctgcaagaaagagaatgcactttcaaagtggcttcaaaaataagaataattcaactcacataactggaagttcagaggttaaagctggctccagatgaagtacaagcagagctctgtcactctttctctatgactttctttgtcctgatttttttctctgcgtcagctttgacctcctcactagttgccctccaggttccaagatgactgccagcaacaaatgggtaacataatttcttgttacagtgagagacataaacacttacctcacagattcagagatttcaccctcagataagaacaatcaaaattttaattgtgtatctactgtatcattagtatatgtattaggtattcatatatatctactattgtactaaagatgattcagaatggtttcataagctggttgatttaaacttttcttcctgaaccaagaggatgagattatcttgactggcttagaatcgaagatttaggtgaatctaaatccatctccagaactgaggatggattccgtagaaacttgaagacaattggaattctcctagaaagcagaatttcagagtgggtgtagggatatctttgaatggaagttgtttaagccaccaacaatattcactccattggggtgacactgggcccaaaggtacccagttaatatttgttcaacgaacctataggaagacaatattatctgcaagctatttataaactaaatgacaacgagaagtatttttagaaaagttaatcatatacaatttagtcattcacattgggaggctcttcctaaatttcgtttctgatccttatcttgatctttgacgcaatcatatcttggcctccatctaaaagccagtagaagcctctggccattttttaaacaattggtttaacaacattaattggaatctatatagctcaacttaaaaaaaaaaaaaagaggaactagcttatcataatacaatattgtcaaggcaagtgatacttccatgcagctattcagcatttggtgtattcttggtttctgcagacctaataaaaagagattatctcagcgtcctctaggtttaattttaaaaaacaagaaaccatgaacaatgaaaatgatttcaaaacatcttcactcacatctaaaatatgaaatagctagatcagaggttcttaataatttaatcggtgaagcataactgaaggatttagaaaaagtgcctaaactattaaaagattcttcagctgctgcttaatgttgatatcaagttattttttacactggcaaacagctaagccattccctggtcacatccacttttcagcatttagcgctcctctcaatcatcccgatcacagccccaggaatgtttcatggcatctccgcaataatagtatattactattgggtcctgaattttgaggtagtttatctttcagaaaggatatgaatagagcaataagtccaagtagagtgggctttattaatgatgcccaagattttagacgtatactataatcttcaatcaattttaacaccacttcccttaccctagttttagtctaaaccagtccaactgtgctgtagtctcagataatacaatgttagattttttttttcaagatatagaattgtcgggaaaacttgtatgtaacctataccaatctaaatttcttagcatttaactctaaagagtaaagcttttagcacttcctgtgtaatacaagggcaagtgctgatttctctgaatataattttcctttgttagcacatatgttcactgtttaataaaaataagaatgcttcaattatctccttttgtcaagggcctgagaaataaagaaatatacagagggtcccaatctaaaaatgttttgatttacaatggttcggcttaggatatttttattttacaatggtgtgaaagtaatatgcactcagtagaaatcatacttcaagtactcatacaactgttctgcttttcatgttcaatacagtattcaataaattacatgagatgttcaacacctttaataaaataggctttgtgttagatgattttgcccaactgtaggctaatgtaagtgttctgaccatgttgaaggtaggctaggctaagcaatgatgttcagtaggttaggtttattaaatgcatttttcaatttatgatgttttcaacttatgatgggtttttcaatttatgatgttttcaacgtatgatgggtttatcaggaaataatcccattgtacgttgaggagcacctgtatcaatataggcatttacacaactctcgtactgatagcggcaggaggcagagaagctctaggcagaaaagggatggtccccagcgaaaaccccaccctcaagccaaaaagcctgaaaccgcagctcaaagtgggaacttatatcccagttttcctgctcgaatgttgcctttttctaaaccacccatggccccaccccaccccatcctgtgcctataaaaaccccagactcagctggtagacaggactacagctggacatcagagagaagcagcttgacttcagagggacaacttgatggcataactttagagaagaatccggctggacttcaggggaagattacttgccacccccatccccttttcagctccccttcccactgagagccactttcatcggcagtacaatccctcacatttacaatccttcaatttgttcatgtgacctcattttccctagatgctggacaagagctcaggagccacaagtgtgaatacaaaaggccctttgcccttgctggtggagggcagctgcctcctgtgaaaagacaaatggcccactgagctgttaacgcctaagctgtccgtggatggcagagctaacagagcactgtaacacaccctctggggcttcaggggtcgcagacgcctccacctagatgctgctccagtgctcatgcactccagttcccacctcgtttgcttgcacactccctccagtgaggagttgagagcagtgggctaagtaaataaggcacccctgttgcgagttccacaaaggggtcagggaaatatcctgcttcgttactaagtaggtataaaccctttactaagttagtaattattcagtaataatacttaaatgaaagctattctgttagactaaattcagattatcaaagacacgacagaaaacagctttctcattcatgaacctattatttccttttgtaaaatatgttaaatgaaaatacagccgtcatgctaatttctaatggtagaacatattttgaaaactcctttatgtttggaagattttgctttagtgcagataatcagaatgatgtgatatactaagaaataatttttaaaatgagatgtgacatttctcataatctaaataagaaatggcaaaacattgtcctaagctaaataactcatatgaagtgataaaatattgctttctaaaggtccatgatatgtagtgatttctaatgtgtttaatagcattgatcctattgggtaattgggtggttctaacatgtaaggaaggcctccagtactaatttcatgtactgggaaactactgggcagggatgaatcccttaactcctaagtaagactatcagatcatataaatctgctttttgatttgcaaagactcttaggcatacctcttgagaatattaaacatctactaaattatatgtaaagcatttcagtctaagatttacaatgctcaaaggagaaagattttaaagttcagcattggaatttccataatttccttccaattgtagaattttacaattgagatagcaaataataatataaataaatatgtaagactgaaatcaacataggagtttggaaagaagactgtatgggttaactagagttgtcaacaaagacttcacagaagattgtgatcgtagacattagtaaggaataaaatgggtgcaaaaaaaagtctaagaaacaacaaggataaatttattttgtaaagagtgaaagcatattgggtattacataaagagactggctagtttgacacaatgtgtacttttggggtaagcagtgggaaatcactttctgtaagtaaagtggaagagaattcaggtattggatatggtcatataggatttttcaacctttgttttgcccccatccctatcctaccagtatcatcacagatgttggcaatattcactcacttgcctgaagatagatattcatgtcaggggctacagatatgtaaaggtgaatgaagttaaatagcaaaattcaagcacactagttctgactgtgcaccctctctcactcagaaaagcactttggaatgcgagagtactcttatattgacaacctttagttggttctaatttataaaaaaatataaaaatatttagacaatttggatattttatatctatgccacaacccattgtcaaatgattgagatatcattgtttggcaacaatgaaactgaaatcaactctaagagtaaagagtacgacttttaaagatatttggttaagagtaatgttgcaaggcagagaccaacattatagaagttctcaacctgtgtgctggatatagctaaaatttcccaggaccattgaaagaaattctcaaatccacaaccacctcaagtgttgtctgtgaatcaaaggagtgatgcattacccacaaacatgtagtagacattttttaagtgatgtagatgctactgcaattaataaatgcaaaattatattacaatattactgaattcagaataagttgattttgtcactatttttctcaatctacgcatgctagatataaagttattatatagagacgtaacatttttaatatttcagaagcatgctcatgatattgtaaaccaggcactgttaaaagatcactggattgggaattaataaacctgggatctagtcctcatttgatctcttgttggctatggtttgggggttttgggcaaactattcaaccttttctgccttggtttaattgataaatgatggtgttttcccagataaatcccttcccaacttaatattaccagatgtagcatctatggtttagaatgtacagtataaattaaccttcctgaagatcttcacaagttactataacctatattttcatggcactgaaaactaagtttttgatagcttacgtttttataaataatttacttactcatttttatcataataataaatctgattcactaatcaccaaaatatcatttttgaaaatagatgcatgaaaggatccgaacttgttatggttttatctgttcaagtcacctaattttggtagccacaggcccccattgtcaataggggaagattatccattttagcaatacagtctctgataacttcagcccatatgcccttcaattccacttttacgtcagattgaatgggaatgtgaggcccccagtagtaaactaaccctactttctctttggaaattggtctttctacctagctctttgcctctgttcacgttcttgtattccacagaaaatatatacattaggtgttaaaatcacaatgattaacaatttttaagtagaaatagttattaagtatagcataatcatgcctttgaattagtacaaaagtaggaaacagagctttagtgacttttttcattctttccaccatttacagggcaaaaatgaagaattttaccaattcaaaactatgcacatgtatagtttccaccagtatttagtagttatgtttctcaagatgtataattcctttcctttctgttttctgtagtttgataaaccctagataggagttaatgttgtttcagttaggtttattatttcttttatgtggtttaatttcatgcaataagctagagattttgtaacataacttgataaaaattttctcccttcgtatctttttgttttaaaataatggattaatatagattgtaattttacagtagaggaaatacattttacttttagttcttatctagatatcttaggaaaaaagaaacatcatttttaaggattattatttttctactaatgaaaaaaatagcatgattttccattctggactttgtaattaactttaccttggaataattgaatcttaaatataacttcattgaaaattttattttcaagtaacattttaaaatgcaaaatttgtgtgatctctactaaaaagaactctcacatcccaatgtgcttatagctacaataattggttaaaagagacaaattataaagaagatataggttgtgacattgaaattacaaaatgtggattagggaagtaagcgtgtagagttttgtatgcaatcaaagttaagttattaccagcttaaaaaacccttacgtaagatgtaaagaaaagcaaaaacctatagtagcaaaagcaaaaacctatagtagatatacaaaaggtaaaaagtaaggaatcaaagtatactactgagcaaaacagtcaaaccataaaagaagacaacaaaaaaaggcatatagaacaaaggatctacaaaacaattagaaaacaactttttaaatggcagtagtaaattcctacctatcaatatttactttgaatgtaaatggattaaattcaccagtctaaagatagagtggccaaatggattaaaacaacaagactcaactacatgctgcccataagagactcacgtcatcttttaggacacatgttgactgaaatagaagagatagaaaaagatattttggtttccatgcaaatggaaaccaaaagagaatggggatagccatacttctattagacaaaataggctttaaaaatcaaaaactaaaaagacacaaagaaggtcattaaataatgataaaaggatcaattcatcaagaaggtataacaattgtaaatatatatgcacccaacattggagtacctaaatatataaagcaaatataaagtgataaaaagaaagagacaaactacagtacaataatagtaggggacttctaccccaaattcaacaatagacagaaaatccacattaaaaaatcaataagaatgcattggactttatgctttagatcaaatagacctagcagacatatacagtacatctcatctaacagcaggagaatatacattcttatcaagtgcacaagaaacaattcttcagggtagatcatatgttaggccacaaaatgagtcctaacaaatttaacaagattgaaagcatgtattttatgtaaaacaacgccatcatggaaaaagtactagtgtaaacaaggtttaaatatgatttactgattgtttaaaaaggaattatcttagccctgatctgatgggatttcccctttgtaagcagcaaaaataagttcataatgaagcaactgtaataatacagcttcacagatctttctgaataaacagagttggatatgtttctacttcagaaaccatttactgtgggctcacagcttttccatacactctttacactcttaattttaaacccattcatcaaaaggattaagacaatgagattcaagtccaagacaataggaagtatgtgcatcaaaactgtcatgctaatgctctgaggaacattgttatttcaatagcataatttaaaaccactgaaaccatgttttatttatgattacctttcatacgttcaaaaagaatttgagatggtttggcagggatgtcttaaagaaacaaacaccaaatttttatttgttgtgcttctaacaagcaatttttcctacgtaagtgttacctgttttctccccttgattttgatctcttttgtatggttggtagttgtcgcacttctgggcatagtatggttttctacaagttaaataaaaacataaattgattttgatgtagctagttccactatttcagttagtgtgttttccatacctgcaattcataacatgtttactgacccagaacgttaaaactcaagtttagttcaatacagtcacttcaaaccaacttaagatagcagttacatttccaaggtcattatgaagacggagttcaagacttcagcagttgaatttgtcaagctcatgggtcttttagttacaggaagtgtgcatatttcacataagaaacagcaactctgatgatacattgaaactcaaatatacccaaggagtgtaaaactactttataagcccttaaacaataaatatgccaacaatcctctgcatactttttgtcattttttagagcattcaattgaattatataacatgtgataccaataaataattaactttttatttatttatttagagaatgattcttgctttgtctcccaggctggagtgcaatggcatgatctcagctcactgcaacctccacctcttagtttcaagtgattctcctgcctcagcctcccaagtagctgggattacagccatgcaccaccacgcctggctaattttgtacttttagtagagacagggtttcaccataatgatcaggctggccttgaactccggacctcaggtgttctaccacctcagcctcccaaagtgctggtattacaggcatgagccacagcgcctggcttataattaactttaaaaaatattctactatcgaatgcctgaaaaaatcatattacttctatgtattaaaaacaaactattacgtaaatagaccagagatacggtgtcagagatgagattccttggcaacagtctctgagacaaaaagttgcacacagaaagtattttgagaagtattgttgctatttataaggaagtgaaggaggcagtattgggcagagagaaaagctcatccacactgcagttgctactgaggcttcagcccatgtgacagggacactggagctgggatggtctttcagagttctaccaaattgaggcaaatgggcgagacttttgtatctttgcactagccaagagcaggcaccagggagaaatgcagctgtgatccttttgtagatattattattctggagtcaatgcaaccacaccacaaatactaggaataatattggtagtgtgggtgcatcgactccagaagaggatcttgatgaagcattacagtatccactacagagaggcactggcatattctgcttaccccacaaatattgcaatgaggatgcaagtaggagtagtgaggacataaaataaatcgattattttccactgggccttaatatatcagaaccattggaatttacaggatgatatttattatagtactcaaaaaaatctcttttaaatctccttaactcagaagggaattttaaaaagtccacaattcacctggtctatgaattcccttttaaaataaaatgtggtttaatcaaatttacaagaaaaaaacaaacaaccccatcaaaaagtgggggaaggatataaacagactcttctcaaaagaagacatttatgtggccaaaagacacatgaaaaaaagctcatcatcactggtcattagagaaatgcaaatcaaaaccgcaatgagataccatctcacatcagttagaaaggcgatcattaaaaagtcaggaaacaacagatgctggagaggatgtggagaaataggaacgcttttacactgttggtgggagtgtgaattacttcaaccattgtggaagaccgtgtggcgattcctcaaggatctacaaccagaaataccatttaactcagccatcccattactgggtatatacccaaaggattataaatcattctactgtaaagacacatgcacacgtacgtttgttgcagcactgtttacaatagcaaagacttggaaccaacccaaatgtccatcaataatagactggatacagaaaatgtggcacatatacaccatagaatactatgcagccataaaaaaggatgcgttcgtgtcctttgtaaggacatggatgaagctggaaaccatcattctcagcaaactaacacaggaacagaaaaccaaacaccgcatgttctcactcataagtgggagttgaacgatgagaacacatggagatgggggaggggaacatcacacaccagttgggggattggggggcagagggagggataacgttaggagaaatacctaatgtagatgaagggttgatgggtacagcaaaccaccatggcacgtgtatacctacgtagcaaacctgtacattctgcacatgtatcccagaacttaaagtataatttaaaaaatgtggttgaaaaacaaaacccacataatacaaactttgccagcttaactgttttatgtgtacaaaccagtagtgttaactatacatacattgttattcaacagatctctagaatgttttcatctctcaaatccgaaactccaaacccactgaagagctcccattgctccctgtaccccagcactggcaatatgaccactctactttctgtctctaaagagtttaactactttagatacatcatataaaaggaagcatgcagtatttgtcattttatgactggcttatttcacttagcataatgtcttcaaggtacacccatgttgtagcataggaaaggatttccttctttttttgtggccgagtaataatattccgttgtgtcctataccacattttttaatccgtttatcaatcaatggacattttagttacttcaatttttggctattgtgaattatgccgcagttaatatgagtgtgcaaatatctctttaagatcctgtttttaattcttttggatatacagatgctcattgatttacactgggattacatcccaatcagcccatcataagttgaaaatatcatgtcaaaaattaatttaatatgcctaagctaccaaacatcattgcttagtctagcatactttaaatgttatcagaacatgtagattacagtacatctgggcaaaatcatcttgcaacacagtacatagtagagtatcaattatttatcctcatgataaatatcatgctgcaacccaatatgtcagaagagagtatcatactgcatatttactagccctagaaaagatcaaaattcaaaatttgaagtatggtttcttaatgaatgcatatcgctttcacaccattgtaaagtccaaaaattacaagttagaccttagtaagttggggactaaccgtacacccagaaatgggattgctggattatatgataattctatttttattttttgaggactggattatatgataattctatttttatgttttgaggaacttccatacggttttccatagtggctacaccttttcacattcccaccaacaatgcagaagtgtttcagtttctccacatccttgccagcacatgttattttctgtttatgatcgtggtcatcctcatggttgtgaggtaatatctcattgtggttttcgttcttcatttgcatttccccgatgattgacgatgttgagtatgttttcagatgcttgttggctgtgtatatattttctttggagaaatgtctatttaaatccttgcccattttaaaatcaggttaattgtttttggtgaattccttattaattactcacctcagagcctttcttcttaaaatacagatttctcagaacctttcatctaatttactaaatgttgatcttgaagaagtattttaatttatctgaatttagtttcccgttctataaattgatagtaatcatgttttccctatccacaccagagtggtatgatgaggaaccaatgcagaaaatgactaaaaaggcatttttatgctgtccagatcttgtgcaaatatattataattgatttgaaccaaaagaatctacattttaagactatttaatattgtcgcatttacattgcactaatggttcctcttttttctcactgatgaagttctagattgaaactctgaggaaactgtaaatcacagttacataactctgttatattaatttatataacttctctgtctctctctaaatatatatatttagactatatatacatatgcatatatatatttagagagagaacgagattacacttaaggactctgcttagtacattgcaacttgcacctcattctaattgtgaaaacaacaacaaattttgattgagaccctgttatttttcagacctttggtcttgtgaggaaggaaaagatgattctgatacttatctcaaatagcttatcatctcctctggtggatgaggcttgtgagggcctgacacatggtagaggatcttattcattatataacaactttcaaaacacatcactaattatttttctgcttaaggtgaaaacgtagctctcccaaacaaataagagatttagactgaattctgtagaaaacactgcttacctcattttgcttagttttcactgcagagtcttgtctctaacattcaggtaggaggaactctattttaaaaaattgaataaacaaacccaaatcagaataaattatttaattcaggagttttttaaggtgctcagaattttggtagaatagcagtgtattttctgtaataagaactacacaatgttctctagctggttatactcaaatggttatatggattttattctgatatcagttttgcaattgatgaccacccttcatcaatagcgtggtctttattatggtttcatctggctttttcttcccttgtcttctgcactgggctgcctacttcttggctcttattattacatactctacttttttcatatacaaaggtcttagtgcattaatagtgagtttctgctaaaagtgttactttcttcaaatatcctgtcaaatgctggctgcctgatttattgacctcatagagtgactatgtgaatcttccattctctgtggaattccattccacattttaacttaaagactccgtcttttccagctgtgttctctctgctggataagcatttttcttttaatttctgtggtaatgggaagggaattttaaatcctgttttgcgtacaagtgtttaacaggtaaaaatggatgctgtgtcagctatctattgctgtgtaacaagctaccccaaatgtagagacttaaaataagaatcattttttttttttagctcatgattcttgattctgcttggggcttggttcatcgaggcgattcttttgctagactcagctgtgctcattcatgcactcgtggtcagctggtagttgatgaccacatgtggcattcatatgtctggtataactttttggttataagttgagacggtgtgggtgacaggatcacttgcctgtaattattcatcaggctagcatagttccatagcggtggaagagttccaagcatagcccaacacccaagcattgttaagcctctgcttatgtcatgtttgctgatacctcattagccgaaacaagtgacttgaccaatccatattcaaggagtggagaaacagactatggctcttaatgggagaatctggaatatctcttgacaaaagtgtagatgcaagaggagaatctgtggacatttactctccagcagagatgttgtcatttttgtcactaagacagttcctgtgtaatattatttattattccttggcagccataagtttgtggtttacttatggatacttcagtgcctgcccaatatcatgttggaaagagaagcccttaacaatttctcttaatttctacttctgaggaatgagaaaaaaaaaattggataggcataaatgatttccagcacaaattctaagcagctatttgagaggtgggtgggtagggagagatggaaaatccttttaattgagacatgctcaaccataagcaatttttctttcctcaggagacatttggtaatgtcaggagacatttttggttgtacatctaggagggagctctggccagagatactgacaagcaattctgatcctacaatgcacaggacagccactcacgacaaaaaattatctgggacaaaaatgtcaatagtgctgagattgagaaaccctgcttttcactgagcgcatgtagatgaattcatataatgttagttatagaagggcacttagatgatgccaactaaaacaggaaaaggcaatgattatttctctattcaagttagtgaaggaaggatatgtttaaagtcaggttggagatatttctcaagggtaatatttaagttgtgagtggatgccagatgcgcttgattgttacaatccatatttttatagctatatcaaatgatcttctctcccaaattaaaatggatattagatatatttcatggataccatatattataagctatagctcttagaagtatttgagtgattaataattcttgcatattgaatgagacatgtaagaaagatacctgatgtcctatgattcttagaaatatgtgcagtggttaagcacattgtcttggaaacatcacttgttaatgtgagatcctgaacaagtttcgttaccttggtaaaagggggatgataacatctaccctgaagatggtttggtaaaggtgaaataaaagagggtttatgaagaaccttgcctagcacataagaatcactgagtaaatgatgggggtgatggcagtgttggtggcaattatcttacttgtaagtagtagcaaatatttatttggattatatttttaatagcaagaaagaatctattaaaatgtaagcaaatagcaccattaagctttaaaaatccatagctcccaaacttaacatttttttttcttaaatccagaaatacaaatggttatcatgaatccttgagttccagtactccggccttgcctatgtagagtacaagcatttatttttctaaaatgagaattattgatgttaggtgtgtcatatattttatttactctttagagtgacagaaaagaaagcagacaaaaataagtgtttatgtgttcatagtgtttgtttctaattttccaacttgtatgtgcagactgtaaatatttagagggaagacatgaaattcttccttacctacacaatagattgtctttcttagaatctagacatgatttcaaattttcttcagaagttctcttgaattcttacggaattcattaatccaaatgccatcctttcaaatattcaaaaagaaaatattctccaatgttgcttacatggaggagagttattttatctactagtgagatggaagtcgctaacaatctttcttataccccatagtattaaatagtaatgcaatttgatcacatataacattgctctcctgttgacatggaatgataaggaggaagggaatatctaacagcactttttagatattctctcatagaattgttaatgtgagcccaataacttattttgtaagttgagtgatttttcaaatataaaagtgaagcaaacaaaaaaagttacccacattcattcaacaaagctagaaatagagtatgtgcttcttgctttcttatcaaccaaaggagacctgtgaattacaggaaaaccatgtgtgaatacttcaaaggaaatatgccaaacacattgtgtgtgtgttttaaaagatttagtagctcctttaaagctctaagtaaagctgttagtctgactaatcatgtacccctgaaaccaattaaattttcagactagagaagtgttcttcaaacacttgaaaaaaataagagttccttcctaaagccaacaccttttaattaacaaaatactcagagcaaagctgtggtttgcaatagtatattacacctactgttattcatgctaccattctggtgtgccaaactcaattcatttcaactattttgagcttgattttctgtctgcttaactatggagggaaaaccacaattttagtagagtcattttaattttctaatgaatgcatgagaaaggtattatgctacatagtatgtcctcagactattcagatgccctctctctctcttgctctgtctctgtctgtctctctttacacacacacacacacacacacacacacacacaatgtgtgtatctatctgtctacctagatatacagtttaattttgtacattgtaatacatctggttctggcataaggtgattgagcaaaaaacaaacaaacaaaacccacccaaatctgttactggaggaacctttaatagcataacatcagaaagactattttcagtaaggaccctaggcaggaaaagacaattcctccaatggacttgagaagaatacccttagtctctgaggtggttagagaggctgagatctgaaccagctaataccagagccagcttcttgtaacccaagataggggcataagaaacggggtgaatgcccaggcatgaacagacttggggttaagattaaatagggtacacgggaaaggatttccgccagctggaggggaagccatttcccatgctccttagggatgacaacaggagacccagcccagaacatcattgaaaattctatgtaataatttatatatcctaactctttacccgttcgttctagattatggattcaggcactcttagcaaaacaaatcctctttcagtcttttaaaatattgacttaacaggaaatatccttggcacaacaatacgaccctgcctgacccttagaactgtgaacaggttgctcagactgtacaaaaccactaacaaatctgaccagcctacacttcactgaaaaaggtgatttgcatatatttctagtactatgacatggtggaaaagaaagaaccgcatatgtgttagataaaggtaaacgcatctgaaagtgcagtaagaatcaatgtgatatatacaataaaataagataaataggccgggcatggtggctcatgcctgtaatcccagcactttgggaggccgaggcaggcagatcacgaggtcaggagatcgagaccatcctggccaacatggtgaaaccccgtctccactaaagtacaaaaaattagttgggcatggtggcaaatgcctgtagtcccagatactcaggaggctgaggcaggggaatcgcttgaacccgcgaggcagagattgcagtgagctgagatcacgccactgcactccagcctggcaacagagcaacactctgtctcaaaaaaaaaaaaaaaaaaaaaaaatttcaggacttcaaaacttctgtcctttgaaacactttgattaaaaaatgaaaaaaatatatacatgcctgaatccagaggcaagtctttttagaaaacataaaatattttaagtaatgtttttctgaacagaaatggctctaatgtgagaggtcgatgaagattagcctcttgcttctttatgttttaaagtatattccttgagacccaaagtttctgactttagaatccaactctcaactactatcagctatcctctagacactttcaaaatcctccaaaacctaatagtggtgcaagattttgtccttcctagtgataactagatttaagtaagaaaacgttaaagactaaaaagtgtttaggacccacaagaaaggtgtaattctgttcctcatggagatattttagttacacacttcttattctggtcctccccaaaacacagaaatctagagttgacatttaaagagaaaatgagatttttgtctggaaacaggagagaaaaagttttcaagaagtatagaaagcgtatgaaaggacacaggtttgaaatggcctgtgctcatgagagaatgcacaatagacatgggtgtggaggagcctggaaagaatggagagaggtaagtctggagggtcaaatctggttcagagtacagagcataaaatcccatacgaatgtagaacatgaggagccaataaccattgtgtgagaaatgcaggaaaaagaggaagaaaaaaatccacatagtgtacttacagtcagaacaatcctaggaggtgacttacatgtatgatgtcataaaatccgtaacacaattccattagattggtactgttttcatagttacacaggtgaaaacttttgagggtcaagatgttcattgtagcaggcatagtataattccttacctcaagatgcctccaatgtcagtgaacattacttttccaagattgtctatttaggaaaaagtaaggccagttgtctatgaaggaagtactattataatcgccactttacagaggagtaaatggagattcagagaggttaagtcatctgactatagttacacagctaaaaaaaaaaaaaattatagagcaaggattcaaatacaacaatctggtcctagaaagcctaaatattctacaccctgctttctgattcagagctatttcctgcttttctcccttcgataggaaaaaaaatgtatgtgtgtggggttgggggcaaataaattgactggctgtattttctctctttaatatttgatctttcattgtctgctccaagcagtgggtcttcctccattatcttctcgtgaaaatagctaaaatcacctaactagtaaaaacctaggcatgttttgtgttctagcctccattcttccattctaatgggtggctgttaaattttagtactcattgtatgtagaagacctctaagttcactaaagagcttactgcacattgacttttctttagattcaaagggaatcaattgagcacctcctatactccaggacatgtgcaagatgcaagagatagagcagtgagaaagtctgataaggtttcccctccctttcccagcagtgtacagatagatgttcttcaggtggtgcatgctggagaagagaagaccagaaatactggcctgacgggtctatagatgagattatctgcccatgactggcgcagggatggccgcattgctagacctctccatcatcctctgaatatgcttcagctaatttatcatcccaatggcatatttagtcatcatgaaccattctctctttttgagtctcaggccctggccttgcttttcaatagacttccaatagattccttcctccttccttcccttactgcctggcttcctgacttccttccttcctgccttcctgccttgtcttgccttgcttttcaatagattccctccctccctccctccctccttcctccctccctccctccctgactttcttctttccttcttcctttctgtctttttccaaacgtgcttttcaggaaacagtggtctgcttgttgaagtctgataattctctagttcctcatccttcactttattgaaatttagtgtgacatgatcatttccacctcattaggtacttctttcatggtcagaagtaagtctggagaaaaaaaaaaaatctcttgtctctgctcttatttgagggtcaaattttcaataagtcactttttaaaaaagcattttctgacacttcccataagcttgaaatcctcctaaattgctgtatattgcctcagtataccttgtgtatctattttaggaacactccatccacatttgccagtcagcctggtgttctgcagttagttcctacagtgatattttaatttagctctcttttcatcctcacacatgcatcctctctggatatttagctcctttcctggaatcccttttaagatttctagatctttttgcttccatgatttcttctcctggactgtgacacaaaatgctatttcttctttacattacatttaattctttctagaaagagcctcagagtagtcagatagctttgagaaacaaaactttttctttattgcctcactgttactgcctttcaatcattgtttcgtgacacaaatttttttattctctctgacaattaaaacactatttttttctgtctgcattgatcaaaattagttccttcattcatagaaaactcttggtgtccctgagaagcttgagagacaagaaacattcttccattctactcatcttcttctctaatgaggagacaaccttaaaagcacagttacatagccataaaaattaatgattggctacctcagaatgaaaattcaatgtctcatttttttttaatattcttagaatcgttcactggttgtccagtgtgagtctcctgttgagatgtcttttgcagctttccttgaaacctttcattccaaactacatagtccaataattttgccaccaatcttctggttatattatgctcttgagtctgttgtctataaacttgattaggcattccttcccctcaccactcacctctgataacccagctgtgtgttggtatttagtatcaattcacaccagcaagttcagccctcttcaatcaatatagggccacacacggacttttgactgactactccccaagtatttcacattttggggccttatctccagtttctcaccacagttgttcatcactgtgtttcttactagccaggcgtttataaaaacagtaatacctaacactattgatcacctactatagtgtcaggcgctgtaataatattattgtgatgatgatgattatgctgctctttctggcattgtcatacgtgtattgcttgtactactcactgaatctacacaactgcccttatgacatttaccctgttattattcctcttttaaggtaaatacatgaaaaatgcttcccactttgccttgcttactgcttattgctagtactgaacaaatgttagaactgaaacttagagaggttatgtggctttaccaaggtcccagagttcctagggcagagaacaggattgtctaccagacattttaattctagtactatgcatcttaaccattaccataggctgacttactctacagtgtccaacactattcatattaagatttatttaatgactttgaaacagtatttcatgtctaaatagaaaaactactaactcgcatttttaagaaaatattgtatcttggtttttcttcactgctggccagtttactaacaatctgaaataaaaagaaaaaaatatgataaactgctcccagtataaaatacagagctaagacaagaacgtttcattggctttgatttccctagggtccagcttcaaattaatttacttcctattcaagggaattttaaatcagaaagaagatcttatcccatcttgttttgcctttgttttttcttgaataaaaaaaaaataagtaaaatttatttccctggcaaggtctgaaaacttttgttttctttaccacttccacaatgtatatgattgttactgagaaggcttatttaacttaagttacttgtccaggcatgagaatgagcaaaatcgttttttaaaaaattgttaaatgtatattaatgaaaaggttgaatcttttcattttctaccatgtattgctaaacaaagtatccacattgttagaaaaagatatataatgtcatgaataagagtttggctcaaattgttactcttcaattaaatttgacttattgttattgaaattggctctttagcttgtgtttctaatttttctttttcttcttttttcctttttgcaaaaacccaaaatattttagctcctactcagactgttactctggtgacacaacctgtggttactaaggaaactgccatctccaaactagaaatgccatcttccttgatgttggaggtacctgctctggcagatttcaaccgggcttggacagaacttaccgactggctttctctgcttgatcaagttataaaatcacagagggtgatggtgggtgaccttgaggatatcaacgagatgatcatcaagcagaaggtatgagaaaaaatgataaaagttggcagaagtttttctttaaaatgaagattttccaccaatcactttactctcctagaccatttcccaccagttcttaggcaactgtttctctctcagcaaacacattactctcactattcagcctaagtataatcaaggatataaattaatgcaaataacaaaagtagccatacattaaaaaggaaatatacaaaaaaaaaaaaaaaaaaaagcagaaaccttacaagaatagttgtctcagttaaatttactaaacaacctggtattttaaaaatctattttataccaaataagtcactcaactgagctatttacatttaaactgtttgttttggcactacgcagcccaacatattgcagaatcaaatataatagtctgggaattgattattatccactcttctaagttgtctgtgccaatttgccttctccaatgataaggataattgaaagagagctataacttaaaaagagaaaagtaacaaaacataagatatttaaaattaccctagatcttaaagttggcatttatgcaatgccatgttcaaatgaacatgtttttaatacaaatagtgcatttttcagcctcagtgtaatccatttggtaaaattatgacatcaactagaaacattagaatacattgatgtaaatatggtttacctagctagatcaaatatactatatatcttttatatttgtgaatgattaagaaaaataatgttggaattgttatacattaaagttttttcacttgtaacagctttcaagcctttctaaagaaatacaaagttgtgctgaaggtatttaggtattaaagtactaccttttgaaaaaacaagaagtgaggcagacagagtaaggggaatttctttgtaaaataaacttcaccaattccataggaataaaagtaatttgatagtaaacaacctgcatttaaaggccttgagcttgaatacagaagacctgaattcagtgccatttgcaaatgatgattgtggtcaagccatctctggatcttcgtttcctattctgagtacagagcatacagagtacacattcacattcacaatatagttatggatatggatgtatataaatatatgtaaatactacatatatgtacctaaaatttgttttacttctgctttaaaaaaagtaattatagccacatttttcagaaaaagtaactgaggctcatagatgtcaaattcccagtaagtagcagaacaaggattcaaatccaagtccatttgattcctaagcttgtgttattacttgctactgcagagagtatacgtagcaagtaatatatgtactgcaagcaatacatactattgctgcggtaataactgtaactgcagttactatttagtgatttgtatgtagatgtagatgtagtctatgtcagacactatgctgagcattttatggttgctatgtactgatacatacagaaacaagaggtacgttcttttacaataccatattgagttatataatactcccaggacttttatttaccaaaggaaacaatattttataatgtttaaagcccaggttttgaagttacattgtctgggttcaaagcttggctcccaagctgtgtgaccttgagtaagttattctgcctacctgagcccaagtttatctagctataaaatggggatagttgtactatctgccttgcagtttgtcatcaggattaagttggttggtacatgaaaaatgcttcccactttgccttgcttactgcttactgctagtattgaacaaatgttagtaattatatttggttccaccacgaactctagaaatctaaccaatgatggcatttgtattatgcaaactgtatatcacatcataatattatatggaaatgagagcttgtttccgcttctgtagcctagtctaccattgacatagcttcctgcagaagttaccagataatagattgggagagaaagtccacacttccttgtgacgggtttgtgagtccagcatttagggaagccattgatgtgctcagtagtctccagagttctctaaataaatgtgtccttttcagaaaggactactgatttgatgccccctcacagagatcgtctttaaatataggtcaaaaactaatgtagagggccaggtgcaatgtttcacgcctgcactcccagcgctttgggaggctgaggcaggtggatcacttgaggtcaggagtttgagaccagcctggtcaacatggccaaaccccatctctactgaaaataaaaaaattagctggtgtggtggcccatgcctataatcccagctactagggaggctgaggcaggagaatcacttgaatcctggaccagaggttccattgagctgagatcacaccattgcactccagactgagtgacagagtgagactccatctcagaaaaaaaaaaatttagggggaaaaatcaaaagccatttctgagacacaaaaatacaggatttataaattatatatggtatatataaaaatatttttaaaatagtatatatagcatattatatataatgatatgtaatgttcatatattacatatttataaaaaaatctaatctcccttctcttgcttgctgaatagggggatgctttgcctgcctcttcctcttatattaaaaaataattcttaaagacattgtcagttcttggcttttatagcctcaatcaccaaattgtcggtaaaatggccctaaataatcattaaacaaatgtgtgtgagaggggaaataagaaggataagtaagtatggggaggattttgttataatttcaggaaatcaatatcaattttatgtaaagttttaaataaagcaatcccaactttaatgtttgatgtgtgaaaaattaggcaaaattccaaaagggctttataaactgaaaaaaactttactaacacctatccatttttattattttaaccaacttctattgagctgccactaagtacctgggaaacataaagttgtacaacatagaatgtgcaggtaaaagaggttgaaggaagaaaataataacactatgatagagataaattttaggataatagctaacacatatgatatgccagtcattgatctaagtacttcacgtgaattctttaatgcttacaacattactgtgaggtagatagagaggcacagtaaggataataacctgcctgagatcgaggaagaaagacaatgatgagatgtgaactcaggcagtttggttccagagtcctctcccttaaacctcatagttttcaacttctctgatattgtgtgggtgatgctgttggggctttcttcagggaaaactaagccaggagagagaatggatgctagtgagatattcctgaagaaggaaaaacttaagccaggcattaaagaatgagttggaattacctagctagataaaacgagaagggcaatccaggcagagggaacagactgtgcttttcactgaggtggaaaaaaaacagagtatatcagaggaattgtgattccatatggctgaagttaagggtatatgatgaggaagaaattgatgaggttgaatagagaggactggggctaaataatgggaatcctttgttgccagactgaggaattttgatgatggcctacaggcagtggcaactctgaaaggattgtaaacaggaaaataaaatcatcacatatagtttagttgcctatcaattagagctctctggatgcaagcaacagaaatcattctctgattaaatcaggcagaaagtaaatgtgctgtaattagcacaaaggcattggaacaaaacttacaaaaggaaaaagaatctgagcatgcctttctgggcatgtggctagcaagaagtattccagtctgtttgtgatactctcttttctccatcctgtgtgtaactctgttcaaattttaaagtcttaaaagagagtccagttcaccttgtttgggtcacatgttaatacatgagctagaagggagcagaaaactttgatttaaatccctctcctcccaaagtctcaaaattagggaaaggcaattctcctgaatagaaactgggttctattgacaatagaagaaggaaatgattctgaccaaccactaaacaataattgtccactgaactcagtcaagaacatgtagaataagttggaggatagagcaaataaaggagatttgtaggaggtaattattatgatctaaagcaagcttgttcaactcatggcctgtgagccacatgcgtcccaggatggctttgaatgtggcccaacacaaatttgtaaactttcttaaaacatgagatactttttgtgacttttttttgctcatcagctatcattagtgttagtgtattttatgtgtggcccaggacaattcttcttccagtgtggcccagggaagccaaaagattggatacagctgatctaaagcaacaggttcatctactcaacttcacaacgtgtagacctgaaataaagaccattcatataccaatacctgaaatataaatttgtttgaccatgacacgtacagtaattggttctcaataaatgtggatagcttgatggataatgtgaatgcaatgtgataaggaaacttcatattcaacaaagactggaatgtgaggattataattccaaagcaccagaagatagataagataatgcaatgagacattttatgactcaaggcaaagttagttatgagattcagaccaaaccttagacgtgcagtaattgaaatatttgccacagaaggggtataaggacatgacattcaagtaagctaacctttcactagctttagactttgaactcagaaaacatatttggtgaaaagcttatggtcccctttagtatgtattgcttgattaaagtattattttagaaaatggtgagctgcttccattttgaaataaaaataatttttactaagtgaattatattcagtgaaaaaaatggaagctacaattacaactttaatttttttaagttttaagaatacagccatttaaaaaaattaagcaaatctgcttcattttagacagtagaaaatataccattatcttttagaagaatagagatgtgaaatatgcaaattaagcctttagaagtaaagcacacatgaagttcaaagtttaatttctagaattgtgaatcaatagcagtggatgatttgtactttatagcttagtgtcggagaaatctgattaaaaaatgctttttctgtttcatcacataaacataagtaaaattgctctgaaacaacaatatttgacaagaattagcagttttcttttttgacataatctatcaaatgaagggaaaaatatgtcctgggttttgctttgagagtgattactaaatctgacccttaaggaaaggaaggagagaacaaagaagggaggaaagaaagggaaggaaggaggaggaaagggaaaaaaagaaggaagagaggaaggaaagcaggaaaaaggggaaggagagagaaaagacaaaagaaaggtagcaaggaaagaaaaaaagacaagaaaggaatattaaagaggacaaaagaggagtgaggaaaggaggaaatggaagagggatggtgggagacaggagggagaaaggtggagggggaaatatgaagagaggttcccagcagtggagactagtgttgctatcaacaaatagaatttagatggccatatgatattatttttcataatactggtgtctgattgcctgtgctgagttaattgtagtcttttttttcaattccgtttggccaggtgttcaggataattcaccacaaaatctcaaccactgcacttgtattgaataaagaattgagttggcaaaggcattttatcctccagtaagacctttccagattggggttgagacaaattggccaatctggacaagatgataatagcattgttcaagattaatttttaaccacacattgcactgttacctgggagatttcattatctaaaaattgaatgagcagttttagtgggtatagtgtatatttaaatgggacataattacttgaatgagtttaatttttgttgttgttgttaaggtcaaagtacttaaaaattatgattttttaaaactctgtctatacacaaaaagcatttgaattagctacagaataattctgattataacttttggtgaatagattcagtcaaaatctgattactaaacaacttgtgtagtatagccctggaagaattgatgggacaatgtgtgggtaaagtggcattggctatttaaactaaaagcaatacaaaacagaatgtttcttggttttattctgttgtcacaaacccagcagaaagtggctattacaatagtttcccttattcaacaaatgagagaagttatagacaatttagttaattgatctaaagtcacttagtaaatgtaattgtcctaacataaacccagacccccagacctcttgggaatagataatgtttcttacttcttttctatttcctcagccacccccctcaacttcttacacatctcatttctccatccaaattataacaaaacaaagcaaacatggtttatttccatgggcatcaaatggatttcacgaggttgggtgacagtcatcttagggtgaggagattgattattctgtttttctctttcatcgatcaacaatccagcccttctcatctcatcatttcatttctgcacaaacttgtttaagaaataccaattaagaaattaattaagaaattaatgttgtaatctgtttggctgaagatatttacaaattttgtgctttaattatcttccaacaaatgtacatgtctctggtagacagcttgcgaccatctggatgactgatccatatttatataattttctttctttacctaatgagaccaaatccactattatcttcaacgaaggatgtaaagatatgtcagtgtcagtaatgtgacttattttatattctctggtcataacaaaaataaaccgccccttaaataaaaaggtcatagagttgcaaacacacacacacacacacacacacacacaaaatcatattttctaagtctcctaattacctttttatggaaaatgataccatatgcttttttcttaaagaaactacataaacttataaactatactaaactacacatttcaaagtctatgaatggaaatgtgtatcttattatattttaattcaattcactgtaaacttttctgtcaaaatcttatcaagcaaaactgatccaggatatttacatgaattctgatggaagtcactgtactgtgttttccataaaataccagtgggattctgataaggaagtttatgtttgccattgtgtttaaatagagaattctgggccgggcatggtagctcacgcctgtaatcccagcactttgggaggctgaggcgggtgtatcacctgaggtcaggagtttgagaccagcctgaccaacatggagaaaccccgtctctactaaaaatacaaaattagccgggcgtggtggcgcatgcctgtagccccagctactcctgaggctgaggcaggagaatcgcttgaacccgggaggcagatgttgcagtgagccgagatcacaccattgcactccagcctgggcaacaagagcgaaactccgtctcaaataaataaataattagagaattctatttacaaatttcctttcttggatctagttagggctcctttatatggagtgatttttattgttttcatagaaatacgtagaatctgggtcttctctaactttcttacaggaaagcaatgtaataaggtttttttttaattttctgaaagttatataatgttattgttccctaaagtttaggacctgccttttaggctttccatttcaccataacttttggtccttaaagtctgtaattgaagttacagtgtgttatgatgtaaatttttcttattattacctttaatgttagggtaatgttaactaatgttaatgttaggtatatggttgtttttttcattccttcgttcaacaaattgtctttgaaacccatgttacaaagcactctagagtcaggttgaagactattaagaaaggagaatagaaagagacactagagtaataatttggatttaaatttgatttccttgtgtatgatagtgaataagtgtgaataagatgaggcagtgatcacacatcactattagtaaaagtgtttctgtacctgtatccacacttttatgtatatggttacttatgttaaagtgatacatattatataaaattaacgtatacattaagtagatattttaatagtctgtaattaaatactactagtattttctttcctccttcaagtgcttacttttgatacctcgagttacagtgtcataaagattctttagaaatatattgactgtcttttaagagcttttgatacaatactgagtttacattcatctgttatttattgaacacttgctggtgaaaggcatcagtgttatctgctcttagggaacaaaaattaaaaagggataggccctaattttagagtgtatcctctataagaaaaacataaaagatagggcagtcatggccacaaaagaaaaaagtgttatggtggtttcaatcatatatgtattagaatgaataaatcaactgatcaattgtgatttcttattctaaatatgtgcctgcctttttcatatagatgaaaattaagctatgtttatctttccagggatcttgttgatttttattcaataacttgggagtgaaagttgatttttgcatatgttttaatgtttttaaatttcataaatgaattgatcagtaatttccaaggtagtaatggctgcattgtttttgaaaaaaaaaaagcaacaggatttgattgtgcttttatgatttttaaagaattcattaaaaataatgccacggtttctaaaatgatttgagtcaatttcttattcgatttataaaaataactttgaatacaattttagtaattcacaaatgctttcagttcccttacctttatattttatattctgtgtaaacaagtgacataatatttaagaattatatatctcctatgatttattcaagaaaagaatatatactgtattatttatttcaagaacagaaatgctttgatttaactgtcatcttctctcttcaattatggaagcaaaataaactgtaatgaccaatgtaacccctcccccatatcaagttaatctatgttcaactccagaattatttttgaacactcaaactagaaattaaaaaaaattaaatccatgaagacgatttttgccaaaagcatatagataaattgagttgattctatacttaagaaagtggagaggagagagtaatttggagagagtaatttactcttaatcccatattttttccctaaatgtgaaagaagtagattgtagtgagagggaaaataacctgtagcaacttcattgaggctaagctttctgtcatgttatattatacgaaagtaatgaaatgcttccacagatagaatcagaagtcccctctgagaaattctacataaaaattagcctgccactttaccacacttactcaagtttgatttttttaagttatgtaatagatgttaggcactagaagaggacatttactgggggcaaagatcagtagttggaaagaatgcaagcaggcaagaagctatatataatgagattttacagtacaattgttttctaaatgaaaatgaggacgggtccagacacaatggctcacacttgtaatatcagtgccaggatggaggatcccttgaggccagaagttcaagagcaacctgggcaacagagtgagacttcatctctacaaaaaaatgaaataaaaagttagctggctgtgatggtgtgggcttgtagccttagctactcaggaggctgaggtgacatgatctcttgggcccaggagttcgaggctgcagtgagctatgatagcgccactggattccaacctgggcaatggaacaaaactccatttctaaaaaagaataaaatataaaactaaaataataaataaataaaaatgaggatatattttattttaacatttggaaactttgtaggtgaggaccatgcaaacattcaaggtgtgagttctgaccaaatccaattattaaccataccaatgacttaaggtttcttcacactccttaaagttgattaatataatgattatatagttgactggtatgtcacagcttgaagcctttgagatttattcctgccttttctgtaaaggttgttttgttaattccagtatgtactggtcgtttttgttttgttttgtttttgtttttgttttgtttttttgagatggagtctcgcactgttgcccgggctggagtgcagtggcacgatctcggctcactgcaacctccgccacctaggttcaagcgattctcctgcttcagcctcctgagtagctgggattacaggcactcaccaccacacccggctaattttttttatttttagtagagatggggtttcactatggtggccaggctggtctcaaatacctgacctcatgatccacctgccttggcctcccaaagtgcggggattacaggcgtgagccaccgtgcccggctgccaatatgtattggtctttttcatcaatgattcagtccaaaatcattttgtcctttaactatatattttcttgtaaagctgcttctgttgtcttgaacttttcttttcaaatgtatgttgtcatttgactttttagattgttattttctggtcctcgaaataaatttaaatttcctgtaaaggaaggtgtaatattctatttgacatagccgctaaagatgtactaggtgctttataaatattgttgatttactttatcttcacagattactagttttacttagtatttggaatatgacaacattttatagagctatattcatatatatgtttatcttaactgttaaatgcaatatgattcatgtcttgttttggtcaatgatgaatgaaagtctcctgagaattaaatttactgcatcgatgcaaaaacaatcataattttagacactctaagaattttagaaattaaaggattttttttttccagtttactctgttaagattgtgtttagctatgcgtgacagcattctcactacagtggcttatccagatagtttctttttctcatagagcaagacttccagaattatgtgttccagggtcagtgcagcacctccaaaaccgtatgtcccaactttttcctccaaccccagtcatctccaacatgagactttctttttgttttgttttgttgtttttgtttttgtttttgttttgagatggagtctctgtcgccaggctggagtgcagtggcgcgatctcgactcactgcaacctctgactccctggttcaagggattctcctgcctcagcctcctgagtagctgggattacgggaacgcaccaccacgcccagctaatttttgtatttttagtagagacggggtttcaccatgttggccaggatggtctcgatctcctgacctcatgatctgcctgcctcagcctcccaaagtggtgggattacaggcgtgagccaccgtgcccagcaagactttttttcctgtggtctcaacatggctactctgcctccaggcactatgtctgtactttaaaatggaagaagggaaaatggggaaagtaaaagcatattccagctgtgtcagctcctgtttgtaaggaaaaccagtgcttttctggcagccccacacagaagagtttctacttgaacagtgcattaaccagaaatgtgtcacgtgaccattcctaacttctaaggatcttgggaggattgagtgttttaactgaataggtgtgtttctttcttcataattcaaaatgtgaaaattggtaacttagttataaaaccttgctagtctgaacagaatttggatttttttagctaagaaggaaagaaagggtatcggataggcagctggctatgctagccaagatactcttaataatgcacatttttcttctttggacataagcagttttaacttagctaaatatgatgtgattgttttcctgtcttcttagttctgtttaaatttgtttcagaaatcaaggaaataaaatggagaaaaaactctattattcatgtctatctttctgcctctgaatatttttatgttggagaaagagaaagcagtaactttcataatagcttacatagtctgacaaattctaaacatgtccgttagcatcaatatacgtggtattaggtcatcagtttttatattctgaattattaagacccaaataaacccactgagttcaagagaaagtatacactgagcaataaaaacattaccagttctagcaatgataatcaaacaagaaaacaagtaatatagtctgtttagaataacatgttttaaagatcaagtttttcttccttaccaatgttgcctttcttgtaacacttttttttccttcttgagataggctttcctatcttttgtcacaaaccccaatatttacatggccattcgtagtctattcatagcagcaccaccccatggcccaaacttgtagatattgccctccttctatggttgttctaataagaataaccactcttgtctctcataatctcagctgttttgtgccgttaaaatggaaaataatgagtattaagatactaactaggggccaggcgcggtggctcacgcctgtaatcccagcactttgggaggatgaggcgggcggatcacgaggtcagaagattgagaccatcctggctaacacggtgaaaccacgtctctactaaaaatacaaaaaattagccaggcgtggtggtgggtgcctgtggtcccagctactcgggaggctactgcactccagcctgggcgacagagcaagactccatctcaaaaaaaaaaaaaaaaaaaatactaactaggtttcagtcatatgagatgaataagtcctacaaatctgtacagcctagggcttgtagttaacaatgttttatatttaaaactttgctaagagagtaaatctttttttacctgttattatcgtacatgcaaaaataatagtaaataaggaaggtaagagaaaaattttggaggtgatgcataggtttatggcatagattctggacatgatttcacaggggtatacagtcatgcattgctcaacaacagatatacattcggagaaatgcatggttagctgattgatcttgttgtgcaaacatcatacagtgtacttacacaaacctagatggtacatcctactatacatctaggttgtatggtatagcctattgctcctaggctataaaccagtacagcatgtgactgtactgaatacttcaggcaattggaacacgatggcaagtatttgtgtatctaatcacatctaaacatagaaaagttacagaaaaatattataatcttataggaccactgtcctacatgtatacagactgtgcacatgatagtggtccattgatcaaaatgtccttatgcagcacataactgtaattatctcgaaactcatcaagctgtgttcattaaatgtgtatagctttttatgtcaataaagtggttaagaaatcaataaagtggttaaaaaatattttgactaggaaatatactatcatttctagttgataaaagatctcaacatttccaaaattgtcctacagaaaaccaggttcatcaggtgttcatacatgatcctcatgaaaaggtcaaataagctgaaaaacatgcatagacgttgcctatcctagcaatctatgatgtacatctccatagtaaggtcactgaaaagtcttttaggaatgttagtattgttagctcagtatttctcagtgatttctccatggaaaccatttgtgtagagcatcttgaggagcacagctgagagaacattatcttagttggatgtgtatgtccctctgagtcacttgatttctctacatatgcttttaccaaattaatcttttagaaatcttttctcttcgcactatgtctataatttgtgaagttgttaccaggataacatttgtgcctctcaccatgatgtacctaccagggtccaagcagccattccttctctagagcaactgtctgagggaaagaatttaacacagcattctacgaaatcattttatttataaaaatagattactgctttacatatagtaatttatatttagaatattgattaattattaaaatctgcatgagagctttaaagagtagtacataatatatagcagtttgtactcaaactgtcttctaaaaaggattcactttttgtttgtattctattgtcctattcgttgatagtgttacgtaagtaattataaaacttaaaatctggaaagagaatgtggactcagaatgccatctcttttgttatttcaaatggattagaaatgaacatacatattcattttctttcattacacatccagagaaatagaatggattttataaatatgtaaaagcaaggattttgatcactgataaaaagggaaggtttggtcactaccttatttcattccttttttcttatccttttttttttttttgtcaattatttgatgacatctctgaacatcaccttttattcatgacaagaattgggtatcatggtaaagaacactgttaatataattcagttacttcaccccctcctgaaatatagagaagctttaagactatgtgaatatttttttctggttttcttgtatttgtagaaatagcatgagctttgtttaaagtcaggcatctaaaaccttgccctgtatgttattgacaacctgcacaaattttaggatctattctattacagtttgttcaactgtaaaactaggatagcaaactctatgtcatattttcgttatcagaatttaaaaagcatgttttaagatcttagtaaataataaatctctactctgtagttgaatttgttctatattctttaagaaattccctttgatggttatgccaacctctgtattacttttcttcacactttaactttgcgctgaaatcatagtagtattttacgttatcagtcaaaataacagtcatccttaaaacaaatatgaattttagatgattaaatagatttgtatggaggttcttcttgctaatcatagcagttatccttggtgaaaaatgatagacacttgaaaaaaccaattaatcatgatggctatttttgcatcataaataaagctttcaaatttgagagggaatcaaaagggcaatggtagtatagtgtctcaaagcccctttccaattgatggtacaaatttaaaaagagagagagagagagaaacatgtttcactgtaattgttttctaagagcttccaaaaaagcgtattttcttaatagattcaaatttttcagttggattgaaagggaagtcttggagtgtagtgaggagggcaccttctgttgagaggtgttcagacgacagagtgtgcccaaggccaaagatgagatggttttgcgaaagtcagtggccacaaacaggtgtgtttgacccctgagagatatgcaggaagtctaccccactttaattcttccaaatattctttaccttaattcccaagtacttgataaaggagcaatggggagaaaatatgcacactattatggaaaagttttgacctacactttggagagttttagattaagagcattctagaaatcagtcccaaatgcctagggtttacttacttaaagataatatcatagtttgggtgactgggaagcataccctgagattgaggtgagcatgcagtatgtctatttaggagtgttcttggggtcaacgtgtaggggcagagggagaagttgagctctgacgcagtcttagtaagggcctcagctgaccgttcagggagttcttaagctggaatgacccttcagaagtgctaggaaacgaagaaaggggactggatctttataaccccgtgtcaagtcatgcactggatgtgggctactccaggaaggcaacgaactttagcaagatgattctctttagccacgggaatttccataagggggctgctatggtctgaatgtttttgtccctccaaaatgtgtatgttgaaacctaacactcaaggtgatggtattagaaggtgggggtttgggggggtgattaggtcatgcgggctctgccttcagaaacaggatcagtgcccttataaaagcggctccagaaagcttccttgccctcccaccatgtaaggacacaccgaagatgccatttaacaggagtgggccctcaccagacaatgaatctgctgatgtcttgatcttggaattcccagcctccagaactataagcaataaattctgttgtttataaattacccagtctaaggtatttagctatagcggcccagactaagacaagggctgacagctgaaggctgtctaccagcagcactcctagcagctggggaactaagtccttcatttccaaaggggaatctaggcagcatatttacagcttttcactacagataagctcattatttcaaatagggactagcaggaaaaaattaaattgcccaaaatttagtgggatgctgaaatagattgtggtgtgtaaattggagtatagtgaggagagcaccttcaaaccagtatgtactacatgatattgtttttgttgcaatatttattatatacccaaacacacatatattacttttagaaacacacaccacatatatatctatgaatattttatatacacatagggaaggattgttgatgttatttatgctattttaaagatcgatgttttcatataattatgtattggttatatattatttcttgatataaggtaaaaaaaaaaagcaaaacaaactttaagtgatcactatgaaaagaatcccaatgctgcacatttaggtttatccaactcttcccattaaaatattaaatagtagaaataattgtgaataagaaagagcagattttgaaaaatggaaagaaatgcttaaagacatagcattgttgcccaaccatcattatttaaacatacagtgtttggctttgaccaaattgccttcaaacacttccttttggcccaaaatgttaggtcatatatactaccataaaattcatgatgcttaccatgcattaatttctagtatataccaggcattgtgctatgcatatcatattcaatatttctaatcctctcaaaagtggtacaagctaactggcgtttttcttgttttgaaagggagaaactcagagaggttaagtgacttgcccaaggcaatgccattgataagtgccagattctatcacaggtttattggcaacaaaccatatgtgcgcgtgcatgcgcgtgtgtgtgtgtgtgtgtgtgtgtgtacacatacacgaataacatatatggtataaatacgtggaaacataataaactgcattgagctgcgtttataattagtatttaggacatgtttggcaaataaaaacagtggagattgaaatggatttgcttaggaaaaatgatacattaaaataggctttattatgagtcttcaactattctgtgaaaatagatacccagggaagaaataatagagaatatgaatcttgagcaggcaactgagaacttgtcgaagagccaagataaaaatgtcagagaggagaatattttggcagctcagatgagcccccagagggtgggaggcaatgatctcaccgcagtctcgtatctgaaccccaggtttttgcatctccataaagtaatttcttacacccctcaataatgatcgggcttactctcaatctctcgctctctctctgtgtctctctcacgcacacaaacatgcagaacatttcttgcacatgcataactcataagacgattatgtaaataccagcctttttatttcataactaaattacaaggcctggttattgtttggactgtgaaaaaataattatgtgaataggtgcctcaagatgaaagacaaggcaagattgtgaaattattcatatgatagtaatagtatgcaaaaaataacacaatctttaaagatctttaacgacctagttataaaaccatgctttataacaaatataaccatgaggaaataaaaagaaaaatgtaataatatactccaagaataaagtcaaatgtattgttgaatgtaaggagttggttacacttccttatagtggaggttattttaaaatttgtggcttacgtggtgttatgaattgccctagatcaacactattatgcaaggccaactattaggttatttttggtagataaccacagcaaaactttagtataataggtaaaggttagctacactcccataccctcactctcaggtgttgtcatactccgtataaaaggttcaatcaagggagacatgagaatattccagaatctagaggcaggatgcagttaaccttagagaaggcatcagacaactagaatcttcggattcaatgtggaaacaaagcatagtttaggcattaaatcttgggcaccattccaaagaatacaggttccataacttactatatttttatacctagcaagctagagatgaggaattgctctcaaatattttaaccaaagcatgtatcttaagtaacactaatctcataagtgaaaactcatttctaatattcattttgctcattagcaaggcctctagtgttgactgtgataaaaaatagttcaaatgctggtagaacccaccccaggagactggcctttctgattaaattctaactctatccccacgtgaattcctgacttaagtaactgagttcctgcacatcagaatataagtatattatagatataaaaacatatgtaattaataaatattttaagtgagacacttctttcatctttatggcttaactatatcagacatttgattatttttagcggtctaactacaaaacaaaacacaaagcccacaactaaaaatttctttgtatatattgcaaagaggcaaccatttggtgtcaattcaatcatgagtgaaatgctattatacgagtacatctccctggcttgtatgggggtaatagggcatggaatttacagattcacaataactgagatattcacaataacaaagatatcaatatgtagcttttcccataactttgtgtaatgaaatcctcagtttgtgctgtgtaaaaagcttattgtttacttctcatgaaaatcatcttagtttttatctttatttaatagtctgtaatttgggggtaatacattcgttttgttgatactatgtgaagtggcaagcagaaaattctaacaggaatagataagcaagtatcctataaatcagagtcagtgtctctctctctctcttttaatgagtcagtctgtctctctctctttttccctgcctggctatctatctgtatttttcagttttgctttgcaaataagagaattgtgtgttgtaaaccaaccaacttaccattaattttctctgaattcaaaagcaattacaagcggactcttgagtttgtgctgcctggttgtctgcatataggccagatgtctagaataggatctttatttactatttttaccctcctaatttcatggtaactccaaggtagatgatatttgtaatcgtacactacttgtcagaaatctttctaataacactgctattttataaaaataaacattaattcagtataaaattttattttaaattgttaattcaagcaaatcagtgaggtaacttttacactgccgagcgtacgtgtgtgtggattagtacagccatgccatagacttcacttgtaatcttttctttatattttttatacacctgaaatgttcatcattgtgctgtagaaaacaatctcattgtgtttttaaaagctagagtgggtattgagaaggggaagaggatcatagaaaaagttggttaacatgctacttaacacttcaaatctttactcgatgtcatcatcagcaacattttaaatttatgcttctactagtttgcagttcttttcctttgattattcttatgatacaagcctttccacacaaaatttatgtacaggaattgtgtagaatttttctttggaaaatatggtgatttattacaatttgggcaacatcatcattttaaaaattcagaatttgatttttctcagaatcatcagaaagaataaagcatatatatggttcatgtcaggagaattagaacatgagaattaatatatctctgatcttttaaaatattttcatgtttgtgaatcagcagatttttcctagtttgagatttaaaaaatctagatataattaaaatctcactgatgtttcaccatcagatgattttatatttgtattttcttccacttcataacttgtatagagaagaatagaagaaagaaaaagggaggattgataatctttctctctcagttcttatagcacttcattttttaaacttattacttccttctgcctgctttgtttgtctacatgtttgtatttcatgatttcttagaaatccatctactgccattctgaaggtcatttacctgaaaatgatagaaagcagcatatattcaaacaactgcagagtaattgtctatatcagttatcattgttcattacttttctgttttaggattgaggggctgcctcgccacctccctcacacccccagcatattatcacaaagcctactgattcattcacatccctgggctgaatttgccacccactgtgtgttcctgttgttttgtgtatggaagtgaaaagatttaatttgatgttgttgaaaagacacagaggctaactttcaattttcatatgtagttcttccctctccctctgcaccacctcctttacttgttgagaaaattgccctctccatggtaacaatagaagaagctttcagattttagtagtagttgttgcagagaaaagaattcaaaaagtagatgaagtttaaaaatgaaaaagagagaggaagacagctgggaagaaggcttaatgtttatgagtgggtgtggaggggaagaactaagttgaatgaacaaagctgagctaaggggaagatggtttttctgcatcccagaaggcaataccctagcctttcctgcagccttcactccccaaaagataagagctttatctgaaattcttataggattcattcctgaagagcagcttgtcaccaaacagaaacactgtgatttcctcagggagtcacagtttattattatttttttaatgtaacgcttttgtgaactccagtttccacctcaattcaaatggtcttttggttacagggtgaaagagacccaacaatacacctttcccacttccggaggcctttggttaaaccatgtctgccacaaggacacaggagcctggtatgactggttgttttttgtttgcttttttgcctcctgtgctttctagattgtgagatactgtaactcttgtcgatgacacatagtaccgaacccacccgaagaagtatgtcagtatgtcacattgtgacaaacagcttctcatgctaagtaaatgcagaaccattgtgaaaggtttaataatgcccactcctcccccgccaaagatgtccatatcctaatcccaggaacctgtgaatatgttaccttacatggcaaaaggctttgtattaacagatgtggttaagttaaaaatcttgacacggagagatagcctgggttaccccagtgcgcccaatgtaatcacaagagtcctcctaagagagaaggaggtgatgatacaagcagagtaaaagagagattggaagatgctacactactggcattgaagatgaaggacagggccaagagccaagaaatgcaggcaggctctaaaagctggaaaaggcatggaaaagaatcctcccctacatcccttagagggaatgcaagctctgccaacacattgtttctagcttgtgagacccattttttggactttggacctccaaaattgtaagataataaatttgggttgttttaagccattaagtctgtaatcatttgttacaacagccacaggcagctaatacagccatgaacatttagtaatgactaactttgcacaattttaatacaagcttcttattaaggtttattttttcttaattacaaggaataaaagtggggtctgggggcaatgtcatggtccactccgttttagccatatgaatttgtatttccagcattagaacaaaaggtgacaaatctgaatgtatttgtgtgaaataataataaagcagaacaaaaagggaaaagtgtccagctggaaatgaagttagagaaagatgaggagaagcaagccaattgtgtagttttcccttctgctttttaaaatcatgatttgtttaacccactgaattctattttagaaacaggactgcaaggaagtgttgatggatttggtggcatgagaaccagagtcacagaggcaggaaagtaaggaataagtgttagaataggaagcagagttgcttgggaagagaccttatgacatgtggacagggctagacttaggagtcagaaagacctgagttcaaatgctatcctttagtatagtttgaagtcaggtagcgtgatgcctccagctttgttcttttggcttaggattgacttggcgatgcgggctcttttttggttccatatgaactttaaagtagttttttccaattctgtgaagaaagtcattggtagcttgatggggatggcattgaatctgtaaattaccttgggcagtatggccatttacacgatattgattcttcctacccatgagcacggaatgttcttccatttgtttgtgtcctcttttatttccttgagcagtggtttgtagttctccttgaagaggtccttcacatcgcttgtaagttggattcctaggtattttattctctttgaagcaattgtgaatgggagttcactcatgatttggctctctgtttgtctgtcgttggtgtataagaatgcttgtgatttttgtacattgattttgtatcctgagactttgctgaagttgcttatcagcttaaggagattttgggctgagacaatggggttttctagatatacaatcatgtcgtctgcaaacagggacaatttgacttcctcttctcctaattgaataccctttatttccttctcctgcctgattgccctggccagaacttccaacactatgttgaataggagtggtgagagagggcatccctgtcttgtgccagttttcaaagggaatgcttctatagtacaaggctacagtaaccaaaacagcatggtactggtaccaaaacagacatatagatcaatggaacagaacagagccctcagaagtaacgccgcatatctaccactatctgatctttgacaaacctgagaaaaacaagcaatggggaaaggattccctatttaataaatggtgctgggaaaactggctagccatatgtagaaagctgaaactggatcccttccttacaccttatacaaaaatcaattcaagatggattaaagacttaaacgttagacctaaaaccataaaaaccctagaagaaaacctaggcattaccattcaggacataggcatgggcaaggacttcatgtctaaaacaccaaaagcaagggcaacaaaagccaaaattgacaaatgggatctaactaaactaaagagcttctgcacagcaaaagaaactaccatcagagtgaacaggcaacctacaacatgggagaaaattttcgcaacctgcttatctgacaaagagctaatatccagaatctacaatgaactccaacaaatttacaagaaaaaaacaaacaaccccatccaaaagtgggcgaaggacatgaacagacacttctcaaaagaagacatttatgcagccaaaagacacatgaaaaaatgctcaccatcactggccatcagagaaatgcaaatcaaaaccacaatgagataccatctcacaccagttagaatggcaatcattaaaaagtcaggaaacaacaggtgctggagaggatgtggagaaataggaacactcttacactgttggtgggactgtaaactagttcaaccattgtggaagtcagtgtggcgattcctcagggatctagaactagaaataccatttgacccagccatcccattactgggtatatacccaaaggactataaatcatgctgctataaagacacatgcacatgtatgtttattgaggcactatttacaatagcaaagacttggaaccaacccaaatgtccaacaatgatagactggattaagaaaatgtggcacatatacaccatggaatactatgcagccataaaaaaggatgagttcatgtcctttgtagggacatggatgaaattggaaatcatcattctcagtaaactattgcaagaacaaaaaaccaaacaccgcatattctcattcataggtgggaattgaacaatgagaacacatggacacaggaaggggaacatcacactctggggactgttgtggggtggggggaggggggagggatggcattgggagatatacctaatgctagatgacgggttagtgggtgcagcgtgccagcatggcacatgtatacatatgtaactaacctgcacattgtgcacatgtaccctaaaacttaaagtataataataataataataataaaatctcaaaataattaaaaaaagaaacaaacaaatgctatcctgatcctaactggctggctgtctttggggaagttggtaatcttttctgtgcttatttcctcatgtgtaaaaaaatgaatatagtacccagctaggtagagttgttgttgggattaaatgatgactataaagcatctagcccagcttcggctacattatagctgcttacgaaattgtagttacgatgtaaaagagaaaaacactggaaaaggaggatatgggccattttattccaccttcaccaccttttagcttggtgaccttgggcaaattatgcttcattccgtgcttcattttccttgtctataaaagggtgtaagtacagaaccattgaggggtggtcattattaacctacctcaaatggtgtctgtaagttaatatatattgtgcttttcctatgtacaatatctagcacataattacaaatcaaatccatcccatgtgcaatatctagcacataggaaaagcacaataactagttattactcttgttgtagtaattgctacgctgtaggagtttgaattgtaaggcagtggagagtcactgacctttacgagaaagtgtagcagaacatttgagtagatagtaatggggaatattacataaatggatagatattaggggcagatattactattaaaatattacagcatggatatttattaaggccaaactggttaattagttgcatctctcaggttcctaatgttgcttaattttttaacctcccattttgtgctgccctttgtacgaatatttaatgctcccaacacctcttcagtagcacatgtactgtgagtttgttttgttattacttgtgtgtattagcattcctttgtgaaccaaaagcatggaattagctgttgcctctaggctacctagttttgtagtttggattgaagccttcacctcagtaacacctattctgtctactatcttacagaaaacttgtaaaattaagacagatcattaatatagcagaaagagacaaagggcagagaacattgagatactggatattggaaccacccaatagtgttgatttatttatgattatcagtttttgtctctgcctagcctcatgccactaaagtctctgaggcaacaaagaataagcaattttgctcaccttatacaaataaaacacagaaaaaggaatcactagagaaatggtactgcagcctttctgcagggattactgcttatttttaaattacttaaaaggtattgaaattattgttcataatgagaaacctgcctaataaaacagaaaattaaacttaacacttccctataatgtaaacagctcggttaggaacacaacattacagaaaccacttaagaattgattgtacttgttcttggagcagaactagaagctcaccgtttagaagctgtgcacatttccctatcaaacagtacataaagtttccatattcctcagaatcggcttcatttgtgccatgtgtttgcttggaactatgccacagaaagcagttctccccctcaagctgggctcctttcatgccgcagtgcaagtgtgtgatatactggcaccatgtgctaatgtagacccatttttatatgataagaattagtacggcctagggaatagacaagtatgtctaaaatcctccccatagaatatgtcccttcctttaaaagctgtcatactgtaagttccagctgagttaaaggccactgtgctcctatagggaaatatattctattgtaatttttacgttctccaataacagtctgttctttgtttactgaagagagctttcatgtcataaaatggtgttttttgacagagaagcagaatcattgttttattatagaaatttgctcttacaacagcaaaaataaatagctcatctcttaagctcctgatcaatgtctaacacctcctacccccagcaacacttcactgcaagtatattaacactctataatagcaattccactcacctaccaagaaatgatcttcacaaatgatttacagctaaaccagagcttaaacacatagcacccaatcaagggcagatttttatctttttcccagtcatataagttctgagaagaaatagattaatgttgatctcccagacaactgctgagaaaatgtacaaaggatgttgtttattttgaagaatgagacctagttgttaagcactttttccccttatatgtacgtccaaaggtaaccattacaccattttgatgcaaatttaggatatatatttattcatacctctcttctccattcggatgttgtctgtgtgagtgctcacagacacatgcacacatacacacatgcactcctgtttcacacttatttgtaaaactcacaaggatttccaagccattaatatagcattgtttaaggtgaacacatggttgttcaccatccatatgtatcttcactttgtagcactcagaatttggcaaaatcagaaggctgaaacctcatggattaaatatattctatataacatatgtcttaattgctgttactgtaaagaaacctggactagccatatttgactaatttctacctaaggtatttgaattcttataaatagattcattgctttaatcacacaagagtggtttatatgaatgtaattatctccactttatagctgaataaactgagcctgattctatccctatatgggaaacatgaattgaacagctgtgccaattattttgataattcaaatttcacatctaccatgtgaagacagcagaagagggttagggggcttgaattattctgattaactgtgttcatgagtgtaatcgcctctagataatcactcatttcttcacttcacttcccatctacaggtagtatcagcgaatggtaacatctcttgctttgcctcagtttattgatggctgccgttagaaataaaaagcatggttttgtttcagtacttaaatgaataatatcttcaaaatgtttttaaaacgtgaaaaggttgaatgcatttttaacaaatgttttgttagctttgacttttatttttgaacagatgagcacaataccccagtactcctttcctagaaataggagtactacctgaagacttatttcccaaagaaaaatatcaggtctagtgcagcaatacgtattaagggcattgaaaagttatattcacaaaatgtgacatcataacatatgttaatacttcttatcactgataataatccttgaagttgtatttccagagagatctcaatttcttctcacactctgaaagtctctgtttatcctttagagtaggaatgtaagaatttaacaaaacattctgaatgtttaccttttttctaaactgaaactacaatccctttttacccctatatagtaaaatataatattacaagtagaatcagcaaatttgtttaataattctttgggacagtttttacaagcaatggggttgaatttatgttccttgtgtgcagtggagttattatattcttcttaaaaagatgcatgaaggtaaattagaaatgttttacatgttttcatgacaggacatttaatcaaagaggagatacaagaggcttttcttgggttactgcaatttaattttccatttctttcttggaagggacattggatgcagttgtacgaggttaatatttctaacatgccacttttattgtggcattcttctgctctcaaacctctgatgatttcccatggccttcaacatgatgtccttatttgggcatctagtgttctgagccctcacattctggccccagcttcccttctcaacttgatcacagccatcgtaattctgctaactaattacacagctgcccttcccactctttctcaaccactctgctgtattctgacttctacactttagttttaaagctactccttgtcctgaaattccttctcccattaggtcattattaattgagttcatcctctaagttacagttcatgttgctgttcctctatggcaccttccctgaacctggtcccatataaaatcccatctctcagaatcccattagggtaggatatgtggtctgtagactattacgtttgtcatttacatattgtcttctattattgggtaactgcgtgtgcgagcatgcatgggctggcctgaaggtcacctccccaactgcattgaaagttcatcacaagttcaattatttcactagagagtctctttcatgtcatccatgaggcacattccctactgtgatgtgttatgcatacaattatttcaataaatattttctagctctttgattgaccaaagcttaattacctgtcaactctagcctcttgtatctggaatttctacagtctttggatagtatctttaggatgcaaaattaggaggagtatgtaccaggcaaactattacaaataatgccctcaaatagttacatttcactattcatgtcttgtaatttatcttctgctttggtattttagtacacttatgattcaatttgctgtatagattcctctgaatagggacaagagaattcgtcttgataagtggaagttcgaaggattccaaaatgatgttattcaaggtagaacaagaaattaatactgaaaaaattgaggagtaataatccccaaatatgtacatgcgtatctcgttttattgggtttcactttattgcactttgcagatatttcactttttgtaaattgaaagtttgtggcaaggctgcattgagcaagtccgtcgggcacaatttttccaacagcatgtgctcgctttacgtctctgtgtcacgttttggtaatttgctcaatatttcaaacattattattattattatatttgttatgatctgtgatcagtgacctttgatgttactattgtaattgttttgagatgtcatgaactgcactcatatgagatggcaaactttgtggggtgcagtggctcacacctgtaatcctaacactttgggaggccaaggcaggaggatcgtgttagcccagaagtttgagaccagtctgggaaacaaagtgagaccctgtctttaaaatatatatgtagaaaaattaactgggcatggtggcacatggctgtaaggagccctgccagctgcatgggaggctgacacaggaggatcacttgagcccaggaggtcaaggcggcagtaagccatgttcactccagtgccctccagccagaatgacagagcaagaccctgtgtggaaaaaaaaaaaaagacaaacattttttcaactttgattttagattcagggagtacatgtgtaggtttattaccttgatatattacatgatgccgaggtttggagtacaaatgatactgtcacccaggtactgagcatagtaaccgatagttagtttttcaacccttgtttccctccctccccactctagtagtcctccgtttctattgttgccatcattatgtccatgacaacgcactgtttagctccacatgagaacacgtggtatttggtattgtgtttctgcattaattcacttagaataatggcctccagctgcatccatgttgctgcaaaggacatgattttgttcttttttatggctgcatagtattccatggtgtatatgcaccgtattttctttctccagtctgccactgatgggcacctaggctgacttcatacctttgctattgtgaatagtgctgaaatgaggatgagaatacatgtggttttttagtaaagcaatttgttttatttgggctatatgcccagtaatgggatcactaggttgaacgatagttgtgttttaagtcctttgagaaatcttcaaactgtttcactgtggctgaactaatttgcattcccagcaacagtgtatcagagttccctcttctctacagcgtcagcagcatctgtcatttttttgactttttaataatagccagtatgaatggtgtgagacggtatctcgttgtggttttgatttgcatttctctgatgttgagtgatgtggagcattttttcatgtttgttggccacttgtatgtcttcttttgagtagtgtctgtttatgtcttttgcccattttttttgatggggttatttgtttttgacttgttgaattgtttaagttccctatagattctgaatattagacctttgtcagatgcatagtttgcaaatatattctcttattctgtagactgtctgtttactctgttgataaattctttcactgtgaagagctctttagtttaattaagttccacttgtcaatttttggttttgttataattgcttttgaggacttagttataaattctttcccaagtctgatgtccagagtggtgtttcctaggctttcttataggattcttataatttgagatctaatgtttaaacctttattccatcttgagttaatttttgtatatggtgtaaggagggggtccagttgcattcttctgcatatggctaaccagccatcccagcatcatgtcttaaatacagagtccttttcccattacttattttcataagatggcaaacttaatcaatcaatgttttgtgtgttctggctactccactgatcagccattccctcatctctcttcctctccttgggcctccctattccctgagacacaacaatattgaaattatgccagtcagtaaccctacaatgtcctctaagtgttcatgggaaaaaaaagagtcacatgtttgtcactttaaatcaaaagtcagaaatgattaagattggtgaggaaggcatgtcaaaagccaagacaggctgaaagccagacctcttgtgccagttggccaagttgtgaatgcaaaggaaacgttcttgaagaaaattaaaagtgctactctgttgaacacaggaataagaaagtggaacggccttatttttaatatggagaatgtcttagtggtctggatagaggatcaaaacagccacaccattatcttaagcaaaaggctaatctaaagcaaaggactaattctctgcaattctgtgaatgccgagagaggtgaggaagctgcagcagaaaagttggaagctagcagaagtatgttcatgagccttaatgaataagccctctctataacataaaagtgcaaggcagagcaacaagtgctgatggagaagctgcagcaaactatccagaagatcaaactaacatctaagttaataaaggtggcaatactaaacaacacattttcaatatagacgaaacagccttctattggaaaaggatgccatctaggactttcatagctagagagaagtcaatgcctggcttcaaaagttcaaaggacaggctgactgtcttgtgaggggctaatgcaactggtgactttcagttgaagccagtgctcgtttaccattccaaaaatcctagggcccttcaggttatgctagatctagtctgcctatgctctgtaaatcaaacaacaaagactagatgactgcacatctctttacagcatggtttgatgaacattttgagccctctgttgagacctacttctcaaaaaaatgtgtctttcaaaatattactgctctttgacaatgtccctggtcacccaagagccctgaggaatatgtccaaagagaatgattttattttcatacctgctaacacaacatccattctgcagtccttggatcaagaagtcacttcaactttcaagtcttattacttaaatcatacatttcataaaggtatagctgctatattgtggtgagtccactgatggatctggataaagtaaactgaaaacggaaagtcctcaccattccagatgccatgaagaaaattcatgattgaggggaggaggtcaaaatatcaacattatcaggagtttggaagtagttaattccaacactcatcaatgactttgagggtccaagacttcagtagaagaagtcactgcagatgtggtagaaatagcatgagaaccagaatgagaagtggagtcagaaggtgtgactgaatagctgtaatctcaaggtaaaacttcagcggatccagagttgctgcttatggatgagcaaagattgtggtttcatgagatgcactctactcttggtgatgatgctgtgaacattgttgaaatgacaacaaaggatttagaatattccataaacttagttgataaattagcatcagggtttgagaagattgactcaaattttgaaagaagttctactgagtaaaatgctatcaaacagcatcacatgctacaaagaaatcattggctataaaggagagccaatcgatgcagcaaacttcgttgttgtcttattttaagaaattgctacagccatcccgaccttcagcaaccgccaccctgatcaatcagcagccatcctcactgaggcaagagcctgtaccagcaaaaagattatgactccctgcaggctcagatgattgttaccattttttttaggagtaatgtattttcaaattaaggtatgtacattttttagatacaatgctattgcacacttgacagatgatagtagagtgtaaacataacatttaatgcactggggaaccaaaaatattcgtgtgcctcattttattgtgatatttactttattgcagcagtctggaaccaaacacacaatattccaaggcagtcctatatattgtttcatgtctctctttcttctaaaatgtgtgtaggagaaaaaattatatcacttatgttactgggccataatatcaaaagcctgcgaatctgatgcacatgataaaaactggtcttaaacctgtcttgattatcctttgttaatatgccaaatttatagaacaatagagtttcaagaaatgtgaacaatgtagaataactaaaagatctaacgttgaatagctaaaattatcaacgccctttatatcactttagaaatgcgtttgcaaatcattatcaacaaattgtagcataaaattctttttttttcttgactttgaaattgtatttcaagatccgcaatttacaccacattatttacttactggcttgtgaaagtgaaaggcattttcatttttggatgttaagggttttagtaaatgacaagtaaatcaatcctttaagttccgtgtggtataatagcttggaaaggaccatcttaatctttttttcaacacagggagataatttattttaaaaataacacactaatagtagattaatattattaccatttcaaagaagtcaccaaatttggtaggcttaagaggttttttttttttttttgagattactatgctctttttttattttatttattttatatttatttatttattttttagttttttaattttactttaagttctgggatacatgtgcagaacgtgcaggtttgttacctaggtatacatgtatcatggtggtttgctatactcatcaacccaacatccaggttttaagcccccaatgcattaggtatttgtcctaatgctctctgtccccttgcccctcaccccttgacaggccccggtgtgtgatgttcccctccctgtgtccatgtgttctcattgttcaattcccacttacgagtgagaacatgcagtgctaggcttaagagtttttttaactccccaaaatatcaacaaattgaaacattactacaaagaaatagagaaataaatttcactgactgtcttattgttttttaagtttgaatagctaataatgatttcttaaacagctatcatattttttatttttaaagctagccaaatgatcagtgatttttataatactgataaatactgcttagaaaaggaacatgtgttctagcaatttccacacatttctgattctaattacttgtttctttttgttttatttttatatttttaagttttgtgagtacctagcaggtgtatatatttatttggtacttgagatgttttgatacaggcatgcaatgtgtagtaagcacatcatgtaaaatggggtattcaacccctcaagcatttattctttatgttccaaacaatccaattatactcttttaattaatgtaaaatgtacaattaaatcattattggttatagtccccctgttgtgctatcaaatagtaggtcttactcattctttctaactaattttttgtacccagtaactatacctacaccacccccacctccccacgacccttcccatcctcaggtaaccatccttctactctctatgtccatgagttcaattgttttgaattttaaatcccacaaataagtgagaacatgcaatgtttgtctttctgtgtctgatttatttcacctagcatactgacctccatttccaacaatgttgttgcagatgacagaatctcattcttttttgtggctgagtagtattccattgtgcataggtaccacatgttctttgtccattcatctactgatggacacttaggttgcttccaaatcttggctattgtgaatagcgctgcaataaacatgggagtgcagatatctcttcaatatactgatttattttcttttgggtatatacccagcagcgggaatgctatattatatggtagctctatttttagttttttgaggaacctccaaacggttctccatagtggttgtgctaatttacatttccaccaacagtatacaagggttcctttttcttcacatacttgtcaacattggttattgcctgtcttttggatataagccattttaacgggagtgaggtaatatgtcattgtaattttgattttcatttctctggttatcaatgattcagtgatgttgagcaccttttcatatgcttgtttgccatttgtatgtattcttgatctgccacaagtctctaattacttgtttcttgtaccactgtttcccttcattgtagtcagtgatttggtcaatcaacactttttacgtatgggtatctgttaactgtatttctaggaatggaccaagaattgagaaatttatcccaaccagaaagaacaaaatctatggaggcacaggattactgaaagctttgctcctatagcctcagtttttttctgcaagttcgctgcttcccagttgtccttgtgataaaattcaaaacctcaaactgatttttaaaaagccaactatatactgcttctactatgtctacctaaacttatttgccattatttgtaaagaattccaggctctaaccagcccatttgaggctttattttacgttcatgcctttgttcatgtctgtctttcccttataatgctcttctcattctctagccaaatctgccaaagttcagctgtagtgccatacttgatatgaagtctttgctgagaattcccatatgtggtcatttccttcactgatttgtttcaatagttgttgccattattattattttttttatactgttgctggatactttcgcagatccaatctctaacctgttgttctaccctaggaggttgaccaatatggcagtagcattgggcttgcttgtctattggcttggtccttgtgttgggaggcatcagcagatcaatggatgagaggagagtgagtcgagggatggctaggttcctttactcacagccccagctcctgtcaagaggtcttgtccctgcagccacttctcagattctactaactataccctccccttagcctttcaggccttgaggaggaaagcctcctcatcccactttgaatgaactatttattgcaagaaccatgactgattcagaatataatctgtccttgaatgaaatagttaatttccccttttgtattctcgtttcatatccctgtccctttatccattcctatattatatcatactatcatatagctaccttatattatactatgacatgagtaccttgtaagtatatcatgctatattatagttcttaagtgtgtgggctttggggccaacttacctatgttagaagttctgccacttattaccatgtgatcctagacaaattgtttaacttctttttcattcattttctttactagtaaaataggggcaatattagtacccacctcacagagtaatatgataattacattgactgatagtttttatttaaaacttttattgttcttactatgaaatgggaaatgttctaaacaccttacaaatattaactctattaattctcataatgaatctgagaggtagagactcagtatctccatttcacagtgctggaaatgatacagacagcatttaagtaacatactgaaaatagtaaaccgaataggtggcagccagtatgcaaattgggaaagcctgactccagagttcattcttttaactagtatgctgtgatagactcttttggcatatggtatgcactcaataaacaactattgttgttgtcgttagcattacttcccattgtattattacacaaaaaataattgtttatgagtatttgtttgctagattataagttccttgaaaaaagaagacaagttttatttgtctatgtgtactagctgagtgcttggcaaatagttgcagtttagtaaatgtttctaaaacaaattattagttgtttcttatgtatttcccaagtctatcctagccttggaaacagctaacacttagctaaacctagaaatgtcatttgagatttcagcagccatcattgttgctgaagccacaggttctcctttttatctccaatttcttcctcagatgattcaccactttctttgtcgtttccctacttcatttttcctatagtgacttttgttctccaataaccattgatagtgatgacagtcccaccttggaaccacttctaactgtcctgttcagcttttcctgaggccagatttcccccaaaatacattttttagcttcataactgctccttccagaaatttgaaacgcattctcaggaattaagcaagaggcatttgattgacgtcatttaatttgtgtttaaatgtgttcttcccatcaacgattaaccagtgcttcagccaagatacataacttttattctccactaaccttagggttgaggtcacaatcaggtacgtaatctgtagagcccagtgaaaaatgaaaacgcagggcccttggttaaaaaaaaattaagaatttcaagatggcaacagtagagcatgaaaccaagtatgaatcccttctaatgcagatccttgtgtaactaactgcacaagttatacgttcaagaagctggtcctggttgaggtctttgtctacctagggcacttctcactcagagaggtggaataatcttaactttctgtcttccgtcatctgaaaacttgccccaaagttccttttgccatctcttgcagcaaacctagtggttgttatctgttaaggattcctggtggcttgctttagtttcctacagttcttgagctgcatgtgttgaatggaactccaccattaccatgtaacacatctgaatactcttattttcctccagttaaattctgcgctccttggaaataatggtcatgcaccctaccttagtgatttctaaatagaggtagtatgtaaaaatacatatttacttgaattgcatcttaagaggccagcccatgggaggcatgaagaaacctatgttactaattaatattcaataattgacagttacacattcaggtagtagtgtcatggaaccatcacgttacatggaactgaagagctgatgagaggtttagggtctaggaggacaaaagtgagtgtattagtcagggcctgaggttatatgtacccagacaggataaaatgggacaatattttattagtggaaatatctatgtgaaagaaaagaaggaggaagccaaggaaggtgcaagagatgttagatcaagatgcaattctgactctgcaaggaagagagagggagagaaggctaggcagaagcatcccagtgtgcggtctagtggaaggaaattttggcaaagctgttgggaagtcattgaggcagagccaggcaaagaagtcccatgtctcccaaggaaggctctctgccttagtattcccaccacacccaatcattgggtgaggagaagtctgtgagaagcttggctttggtgcagtgcaatcatggatttcaaaatgcagtaacaggagtcctcagtcagttaagacccaataatagaaggcctgcatattctcatggtggccacttgggtatgaggagcagtggtgtttaaaactgttttgtataatttaaataaagaaaagctgaggactacttaagcttgattccttcagaagacagtctttggcctttatatttcatgtgatatctttgccatatgctctgataactctccatgtttcccctaccataatacctcaggttgttgcaattgcttttttattgcctgtcatcactactcgtttgttttctctttgagaacaggaattattttctccttcactgctacagcccctgcacctagctcaatgagtgacacaacagaagcacttaaaaaattgctataactcaaatttgggggatattctacaaaatacctggcctctgttggtcaaaactgtaagtgttataaagttcaaagaaaggcaaataactatttcaacttaaaaaagactaaggagatacgacaactaaaagcaatgcgtgagtctggaccagaccaggaaataaaaatatagctataaagttcattaatggggtaattgtcatactctgaatatagagtatggataagattatggtactaaagccacgctaaatttcctgactttgaaactgagctgaggttatttaagagaatgtctttgctattaagaaataaaacctaaagtatttaagggtaaaggggcatgatatctgcaaattattctcaaatgattcagaaaaaaaatatatatatataaaacattacatatacagttatatatctatacacacagagagaatgataaaatgataaataattaaaaataatgtggcaaaatgttaacaaatggtgaatccgggcaagggttacctgggagttctttatcttgcaaatattctgcaagcttgaaattatataaaaataaaatgcatcttataaagtatttattcagtgaataaagaacaaaaaaggctaactgcagttggaagatatttatgaagttggttatgaagattcttaagaagttaccgatggaggtgctagtagaacattcaaaaaagaagtagggaaggttgaccaagtaggaaaatatcaatatccaagccagtataaaatggaaatgagaagtgaggaagtaagtggaagacaatgaggatggttttcgatttggccactctatttggagaggcagccgaatgcaagaatagaagccagaagaagatgctcagtgagatggttgaaagctagatagattacagcatcctcaccagtaaaaccctttcggtaactagaaaggctacaatttagtaccttcctgacttctatgcttattttcttcaatacataaaatggttccgtaaactcttttaccttctgaattctttatattaattttttgaagttgtaaataaaatagcatcagttctacattgttacatttcagcttaattcatattcatttactgaaaatgggaacatttgaaaaatcatcatgggcatttatgctatgtagattgttgatttttatagaaaaatataaaaatatgaccagtttgattttcaaagtcttttcttagacatgtaaatactaagcattcaactcaacatatagagtttttatttgagtattatttaggtggaattctattttaatgaatacaataaaaaattgtaattttgtctaaaagcctaaaatgccctagttataatatgtatgatttcactgtttaacttcctatttcatagggttgctatttataaccacttcactcaactctggggggacttagtgagattaaagacttctgattcactttgtatttgaagaattttttttcctccatctttgctcagctagtggaatccatgatgaattctcatctccaaggggtaagcagtttttagtaaagcccagtagctgacttatgactccttagaaatagcattgattccttccttctcctgtgttttgtttcctctagaatgatagaatccatgtagacacgatccattatcatgcttaggtactggtaagcatgtaatgattttagttttgttcgctttaagttatttgtgtcacaaatatctgggatcatatcagagaaataaataagcacaattagcattctacttgtttgttatgactaaagctaggttgaggaaacagaaaaggaccagaggtcatatgaggatgaagataatactaggaacagcatgtttgggagagtaacatctggtaggggtagcagattgggggcagagaacagaattttatagatggatattttggaggcaagtagtttgagtaatgattagatctaaggtgttttctcatctgtgggtggctcgaaggaatagaggtgaaggtcagtttatttgagaagttctggaattataaaactaagttgaagtcaaagaaagtatagtagcaaataaatagaatacccttaaaaggaaaccaaatgaaaaataatcgttactctcaccatatgcttgtgttcttattagcaagaaattcttttaaccactgtttttataatatcttaatgaaaaaatactgaagcgtatgccatattaaatccctctctttatttctagaaagggaatcaaaggagaaaattcccattctgctatactaaaagaccactaagtaaagagcctattagtgtatgataaatcccatagcaatatacattatcattttacagcttctttgttgaaatgaatgtttgtatgtgttgaccatagagtgggataaaaagttgaaattttgttttgaaatattttagaaatgcatagttgtactgcagttgtgaacctccttagatttttaaggaggctgcttcaaaggatctcattaataatcttctcaggtgcttacaaagcatgtgtctgtcagcagaattagagaatcacccaactagagaacaggtttcacaataccctgagacctattttgttcattagagaggaaaatggcttgttttgagtctaagttgacatgcttgctaatttcagcaataaaagctgttcattgtggtcaggtttaatttagagcctggtaaggttcagattaaagttgatcaacttacttttacaacatacttcttaaatgaactttgaaatcttaaaagaaggaaaaaagtatagcaaacagtgaataatgtatctaaaactgagaagcaaaaaaaatctggttatgtgagagtgaattaaaagaagaacaacccaataaagataatctttgttatataaaaatttccaagtatcgaaaagcacgatttttcatgtgagttacacactataccgaatatatttgtccactgccacatgcatagtccctagaatagtgcctagtgctgaaaaatatttattaaaatgaatggatgagtaaatgaatttatgtattttgccagccctgtgtatttaaagttctctgttaactttgaggtgaaaatttgacttcatctgaggtttctgggtaagtccgttttaaaaattctattgaacatattcaaacattttagggtaggcaattccaaagcaacctttcagcttcccatgtcacagatgaccagagtttcacattctaacactggaaaacatcttatttcataaaatctacctgctactatatggttcctactttaaaatttgttcagtactctccagctgacttatgccacttacttcaatagctgtctttggcaatttgttccatatttcaaacactctgttgtgtaaagaaaccataaaagttagaaacctgaaaattggattttttttctgagcaatcacagcttacaaatgtggaaaatttgttaaaagttagcccctccaatttttcaatacagagaggagaaagtgcctaaagtagatgtacaatgtttggaaaagttttttgcattattttactattaccaaaagcaattgagtttaaatcacaaagcctgtctccctacctcttcacagaagaaacactacagaatgatcaaaatttggcctttccaaaaccaaaattcgttagaaaatcagcaggagtcaaagtacagagtaaataactaagtttcatataagtttcagatacattactatctaccactttcatctcttcatcttcattggcctcatgtggtagaacatcatatttaaaattatacaaacttgctggcttgtttactagtgtggttattataagaaaaaaatgagaaaatatagataaaacatctgtcacatattgcttataaactaacagtaaatattacttgtattttccccaattaaaataaaatttactgagttttagaaccagagctagtcagatgcctttttttcataaatttcttcataaatacctctgagattgtggtccttaaatctagagagactaagatgacagagaaaatagacactgaagaaagggaagaatatcttaatgatttacattactacctataaattaaaaattgttaactttattatatttgtatttttatttaaaatagtgctatattaaagtcatttataatacaggggaataggaatactaacctgtaatctgatgctctccaaacttgcctaaatcataaaagttaattagataatttatttaaaatgcaagatttgcagccctttccactacatattcattagttctggagggaggcaaaaaggtttggtgattcttacggacaggcagcttaggagaaaagctgatttagctcgtctacttcaccttttcatttgacaggtgagaaatctcaggggtacaatgaagttaaataagtaatatctcttaaatcggttctgtgctttttctgtttttaaaataaatataccttaattttgacgtcacacagaatgatattataagtataaatagttatctatcttttaaatacattgtcgtaattcagaataacatttcttactcaaggcattcagacagtggtttaagtaatccgaggtactccggaatgtctccatttgagcctttaaatgaagaaaatctatagtcaagattttcatttgaaatatttttgatatctaagaatgaaacatatttcctgttaaattgttttctataaacccttatacagtaacatcttttttatttctaaaagtgttttggctggtctcacaattgtactttactttgtattatgtaaaaggaatacacaacgctgaagaaccctgatactaagggatatttgttcttacaggcaacaatgcaggatttggaacagaggcgtccccagttggaagaactcattaccgctgcccaaaatttgaaaaacaagaccagcaatcaagaggctagaacaatcattacggatcgaagtaagttttttaacaagcatgggacacacaaagcaagatgcatgacaagtttcaataaaaacttaagttcatatatccccctcacatttataaaaataatgtgaaataattgtaaatgataacaattgtgctgagattttcagtccataatgttaccttttaataaatgaatgtaattccattgaatagaagaaatacatttttaaatcaattcagggcttatatagttgcaaagcatgcattgatgggtgtggtgaccacagtgtggcagaacatttgtggcagaacatttgttctttagttgtcatctgggctggcatccatggagatgccagtctctccctcatatccttggctgttggtccaagcaggcagtggcttcttcctgggccatctttcattcccatgtgcagtgactttcagatctggatatctctccgctactttgatgcccccattttgtaatatcaaaaatcatcgtactgtaccttatgccgtagtagggtgggcaggaactttggtaagacccatctgactagacgctgtgcatattcttttcttctgacatacactcctatccatttaatggggagagtgattcgcagtgattgtgtgttgtgtcagtgagtttccatggggtcaggaagagtgacagacgaaggagtaggggaaactcgccacccggtttccctcagagattctcctcagaaatgaggtccaagtcagctctgctttcaggttctctcagatctctctcggtttcttcacttctctctaccttccttccctccagggacacacactggtattgaattttcttgcttcctctgcaatatcccctcattttccttcccacaacccgaagaatcctttgtagtgcaggaaggaggaaaacctttcagccatctttttttttctctttgaaatcttttgtcttttaccaggcttagacttttcaaactcggaaaccatgagagtctatatcttcataatttatattctgctatgttaacccttccctaaggaaatgactagttgtcaatatgttggggaaagtgaaagagtaaccagagtaaaaggttaatattttaaaatattattagtcatacttccacatattgggtaagtacttattgataatagctagtatttattcagtacctcataagcattagatggtgtgtgcacatgtgtgtgtttctgtgtgtttctgtgtgtgtgtacaaaatctttacagaatcttgtgagctatattttataatccccattttatagacgagaaaacaggttccaagaacagttactcggccgggcgcggtggctcacgcctgtaatcccagcacttggggaggccgaggcgggcggatcacgaggtcaggagatcgagaccatcctggctaacacggtgaaaccccgtctctactaaaaatacaaaaaaaaattagccgggcgtggtggcgggcgcctgtagtcccagctacttgggaggctgaggcaggagaatggcgtgaacccgggaggcggagcttgcagtgagccgagattgcgccactgcactccagcctgggcgacagagcgagactgcgtcgtttacaaacaagcaaagaacagagcttggaatttgtaaatgtctctttctgacttgaaaatctgcgctctttctagtatgtttaccatttcccatcttgttttgttgcttttgttaatgaccttaatcattgtactaagactaaatacttcttttgtctgaaattatgtatgttttgattcacttcctaaagacatgtcttctttcagttgtagtgattgctaattaaaataggctgttcttggttttgaaagtttaactctttattgttgcttaaacaatgaatgtggatgtatgctaatgtattatttcagtaacactagccactataacaggtaatctcccaaatcttggaggcttactacagcagaaatttacttcttattttagtgcagtccaaaataagcagccctctatgaagtcattcaggaacccaagctccttccatcttttgtgtccagagcataagactcatatgcatttaatgggcagatgaagaatgagtattactcatgaaaatttgtcatgagccacgcctggaaatggtgtgtgttaattttgttcatattctgttggatggatcttgtcacatggtcacacctaactgcgagggaattagggaaatagtgtacactgttgagcctaggaagaggaacagatttggtaagatagccatacaattgatttagcagagcattcctccaccatactggaaccttgagggttctccaacaagttgcaacacactgacccaaaagagtgaatcttagtgagtgatttactcaatatgagactgaattcccattacacaggtaagtgatcagtttcttgcctgagaaatatggaaatttggcagtgaggtttatgcaaatctgaacatactatacagagagtcatttgttattttactaatgaaaaatcacttcaattttttccctaagaggaagacaatatgaatgtattatacagtatttgttcaacattgtctgaacattttccattatcccctgcatttttttttcatattgcattgactttttcatgatagagattaaaattgaatgaccggagggcaagtttgtatctctctgccaatattcagtgatttgaatagttcttcttttctaagcttttgtcttttaggaatgaatacctttatgaatatttgcagcctagtggaaaggctgtaatccaaatggtccaagaaagcattttcttaaaagcaagtgtctgtcgagatgtgtcatagcgcttattaagagtctaagctggaatcttagttccaaatatgcctggagcctctaaatggtaccaggataattctgacaagatatgtttatctaaacaatgtcatttgcagccctgctacacttcagtttatctctccctttgaaatctataaaatgggatggaaattcaatactcataaacttttcgatcgtgttcaaaatagaatttttcttagtaaagatttggttttcaggaaaaggacagaaataaaatacttgctcataaaattgtattttctcatttgatgattttggtcttcctttttattgccatgaaacttctagaaatgctcaaaaagaaatcagctaaataaagaaaaaatagttaatatatgtatgtaatactatattgaaacatttttctttctctggtaaatcccatttcataactttgaacagttgggaaaatctatacatagttattgcagtctatcaagagaaaagttcagtacaaagctatttatgtctactagaaatattcatgttaaacttcaagtaattgggtgtgcaagccaccaccatgttttactatatgaaactattaccgtggtatctgttgtattcaggtaattatattgatggaaatcatgcagtaataatctaggtaagagagtaaattttgtctaaatcagatcaaatgaaaaattctccctctttctaatattcgaattgctcatttttctttaactctttggtgtctgaatttgtcaatcattcctggccattttcttctgcaaaagggctgggtcaggggaccaaaagcagataagattagaagaatttaaattttcttccttggaggcgtctgaattacatgaaactcttgttcgtgtctgttaatactgcaaggcataataccataataccttgcatagcagtgaagaggatttggaaagataaaactgcttccttttatcattctgtttatttcacaaacaatattggtgaatgtcgttcctgtaacatttggatttaagagccttgtttctgtagcttctccctccgtaacccccaccactaccatttcggggctatacagcaatagcatgcattactttaaaaggcaggctgcctagactggccacttgttagctttgtggccttgagcaaatgactaatctcagtaaactatctgctcttagtttccttctctgtaaaataggctcacttataactatctcatgggttgggaggattagatgaaataattaatgtagagcccttagatcagggccatagtaaaagctgaatgaatgttagcatttgttattttaattataatctattggggtgctttgaaggcttaatgcaaaatacttaatgagctttttggtagctgtttagttatttcgccccccaccaccaccccaaaaggagagatttaaaagaccgacaggagaaggttgcttggaaaagatggaataagatctataaatagaattaaacaaatattcaggaaagccttttgtgggaaatactgcaaaatttttattatctataaatttaataggtagataaaattactactcccattttagagacagaaaaccgagactcggagagctaacgtaacttgtctagggtcttaggaagatgacaagtgaggaagtagaattcaagcccacgtctatatgattttaaagcccgaggcacatcaaatggaaaaggctggttagtcagaaaaataggaaggtatatttatctgacaacttaaaatattaggactaacctcaggtaattatagtctggatatacatttttgctgctcctgtttatacttttgacttctgtgtatttgagtgtctaatcaaaggattgtcttttacatgtgttggagatgtacagactagtggaccccaatgatctattagctgtgtaaccttagccaagttaattctctttcctaaactgtggttctctcatctgtcatgtggggctaataatagtacttatgctggtagggtgattaagaaagtaaaataattggtgtttctaaagtaaatatgtggcacatattagatgctcattaaatggtacatattgttatggtgagatggatttggtacagagagaactggagatgggagaatatgaagggtgtataatgtggccttttattagctaaaccaagggaaggacttctgaaacagaattccaagttttaagagggagtcgtttattttggaattattttttcagctaaggatttttcaacccagtccagaattcttagagaaatttagtgatagcttataaattttaagaaaaggaattcacattatattgcataaagaactggtatacagggccatagaaggggagaatgttcttctgtatgagaataaaaaaaaacatctctcacacgatttttgaattaactgacagttttatagcagctttgtcaacccatcattcattgctgcaaccaaatctatgaaatccttcatggcgaaataaaaaggctctgttgttctccacatttgtatgaaatctctgttgctaatgaaatgccagccagtatcttcctctcaggtattgtctattagatggttgcttattttagaagaagtggagtcaaccatataaatttccttcttttgacatctagcacctgctgtcaacctgttatagctacaagcagctctcaaaattcacatccactaggatgccgctggcaaccaaagagttcagttcagttcagcgaacgtttgaatgcctactctgtgctatctaatatcagagatggtagaggggatacaggaaaaaagtaagattcagcctttgtctttaaagagctcacaatcaaatgtgggtatttggacaagtatatttaggcaaggcagtttaggataggtgcttcagtagagcagtattacaaaatgttgagagaaaactagaggaggagttttaaatgagggcttagtggaatgcttccaggaggaggctgaatttgacctggtcatgaataagactttgaaaagcagaaggaagctggagagggaagggtatttcaggaattgatgacaggagaatacataattagacctgttaacagtggggtggaagacgaatatcagcatgggagtgtgtgtgtgtgtgtgtgtgtgtgtgtgtgtgtgtgtgtgtgtgttgtggaggataagggagtaaatgaagtcagtaagaccagttagaaggcaagagagcccaagctggagcagtgaccatggagtaaaaagaaagaagtgaaattgagacataaggtggagctagaattaacaggattttgacattgattgcatatataaaactgtcaatctaagagaaggcctgcctctaagagttggagattgaattctttggaagattaatgtcataaccagagacaaactcaggataaggagttgattatgggagacaaagtaatgtgcttaacatgaagctagatgaccatactgagattttaaagaaatggttgaaaacatagagattgcaggagtgatgttacttttggacaagaattcaaaagttacctggaatgtctgagcttgcacagagagagggtacctggtgcaaagaaaagtgaacctaggaaaaagcctagaagttggtttacatttaaggaatttgagaagaggtagcaccacccaccccccacacaacccccaaccctgccaacttacaatatagaagcatttagacacacactgaataataattttttttttgagacagagtcctgctccattgcccaggctggagtgcagtggtgccatctttgctcactgcaactccgcctcccagattcaagctattctcttgcctcagcctaccgagtagctggcattacaggctcccaccatcatgcccagctaatttttttgtatttttagtagggacggggtttcgtcatgttggccaggctggtctcaaactcttgacttcaggtgatccacccgcctcggcctcccaaagtgctgggattacagacctgagccaccgcgcccagcctaaataatgaatttatagatgctacactgtatggtttcctttttctgctgctgtacaaccattcaagtaacataagtttcatcctggttcttaatgataccatgaataaagtatagaaactctttagctgaggattaaagattgttgtgtttaggtagaccaggtttctgatgcagccctcagtataccagggaaattagccattactgtttgccttgtaggtctaatgaaccctttagctttttattttgtatatgtctaagttactctacaaattcttatggaagtataaagagatagtgaaagacaatcttatgagaaattttaataagaattgaaatacaggctgggcacagtggctcactcctgtaattccagcactttgggaggctgaagcgatggatcacctgaggtcaggagttcgaaaccagcctggctaacatggtgaagccccatctctactaaaaatacaaaaaaattagccaggcatggtggcgggcacctgtaatcccagctactcgggaggctgaggcaggagaattgcttgaacccgggaggcggaggttgcactgagccgagatcacgccattgcactctaacctgggcaacaagagtgaaactccatcgtaaataaataaataaataaataataaaaaagaaatacaacttactttttgtatcaaataaattttggtgcacaaacatcataaatgacataatatctgtcacacatcctttagcaaaacaggattgttaaaattcttacagctaatattatgtggtgaagttcttcctgttgaataattaagtggattaaaatatcatatttcctttctgtcattagaaatatattgtgcattaatcagtccttgggcctgagaacatttatctaggttttcatcatctgaaaactcacagtccaatatttcacctgtattatcaattcaccattatcattagagtttagaatgctgctgtctctttccatctatcttctgttgtatctaataattaggagatatatatatatatatatatatatatagagagagagagagagagagagagagagagagagtgagagagagagagagattggtaataatactaatatatataataatattatatatatacacacatacagagagagagagagagagagagagagagattgattttaagccattaactcatatgattgtgggagctgaaaagtcaaaaatctgtaaaatccaaaagcctggcaggatggagaccaagggaagagttgatgttgcaatcttgagtccaaaggtaatccgatagcagaattccttccttttctggggacttcagtcttttctcttaaggacttcaaaattgattggagaaggcccacccacattgtggagggtaatctgctttactcaaagtctgctgattgaaatgttaatcacatctaaaaaataccttcacagcaacatctagattggtgtttgaccaaacaactgggaaccatagcccagccaagttaacacataaaatttaccatcatcagccatcatcatgaggttcataatgtcatgtgtttcttcacatataaatctcgtggttcttttatttttttagtagtacctagttaataaggtacctggaaatatacgttaaataatagaaatggtctttaatatcttaatgaatttcagagttctatcagagtaattgtaacttgtatataaaaactgatatataaaaaacaagtatgttttttcttcctatacgttgtgttaaattaatactaattacctatcatgaaatgaatgttttccatttttcataaatgtatttcatttttaaattaagaggattaatatcaaaacatatttgaataggatttaaaatccaaattacctgttgcgattatatttaattataaatctttcaagtgagtttataataggaaaaatattttttattaaagtgatgtaccataattatgaacataaatagtgttttctactaattgtttttgtcttcattatgtttctttttaaggggaaagatctgggttaacaaatgttttattcatccaccttgaaaattaaacataataaacaaaactattaaataaataaaccaattaaagaaaatagtttttcttccttttttgtgataaagatgattatgagtaaatatattaaagaattttatactcagacaaagtgagctaataagacaaatacaaacagagatgagcccagaaagagatactctacatgtttataggctagcatttttatcttatgacctacagggtcattgtaactaaagtcttgaatttctgttatattttggtacctgtgggcataaataggaatattactccctgatggcatcatgcattttagataaaactaagccaagggttaaacacgtgccatggactgttcctaaaaaatgctctcagctctcaagttatagaaaattgtagggattattattttgtacctactacttctttctttaccaaaatttacttatacatgatttgaaaattgcttgccacctgtctttattctgttgtacttgtcttaagtaaaacatttataaagtaagtaggaaggattaatagattgtgacctttctacatgaaaaggggaaagccgagcttgttctacttttgtcaggaaagagtttgaatagttacctgttactgtaaaacaatcaccccaaacttagtgtcctaaagtagcaataatcatttattatcactcataggttctgtaggtcaggattcatgcattgcttggttgaggggttctgtctcacgatcactcatgatgttgcactcagatgtcaattaggctgcagtcatatgatggcttgactggggctgaaggattcactttcacagtgagttacttgtatagcttgtgagttggtgctgtctagttggtttccctctaaacgagttcctccatgggactacttgagtgttcttatgatgtggtggctggcttaccccaggacaagcaacctatgagttttgccctgagttttctgaaacatgatcccatgttgctttgaatatccccattagacactcccacaaatgtcaatcatactctttgccctaaaagttgcagactacttgtacatgtcctttatcctacatgtgtacaggaaacacgtgcagaataacatgtgtttttgtttcttgaaagaaacaagaacccaccaaaactttatagctccgggacatgatgataattatctcaggtccactcagcctggctccacatggaaaatatgggtattgtaaagaaagcttttgaattttggaggcctaacaaaaagacctaggaagctaatagttggttatgagataattataacaatggtgatgaaagcaattgcgattattacttttatgttagtgagataaatacataagaatgtccttctttaatttcattccttaatttccttaatccccattcttgatttctggattagaggaaagctatactatctacctgattacacaaaaagactggactgaggggtaaccattaggactcttgttagttgaaggtaataaactatattacttcagtggctaaaacaaacaggagcttttttctcatataaaactagaagtcaggaaacaaatggttgctgatgttggtttatccgtttgacaggttctacctttatcctggagattctttggcctttatttctttagtaatatagtagtaacagcactgaatctaaaataagagcacttggtccaagcactggctctgcccccttagtgacagtgggacccatggcaaattatttaatctctccaacagttaattttctcatctgtaaaactgggatcctgataacttccatactagtttggtgttaggattcaatgaaatgacgcatggaaaagtccttttcaaatggctactcactatacaaatattaatgtcttagtaagctcaggctgctataaaataatgccatagactgggtggcttaaacaacaggcagttgtttttcacggttctggaggttgagaagtacaagatcatggtgctgacagatgtggttcctggtgagaaccttcttcttgctgtatcctcgtatgttggggagagaggtggtgcagagaggtactctagtctctcttcttgctcttcttaaaaggacactaatccaattatggaggcctcaacctatgacctcatctaacccttattatttctcaaaggccccacctccaaatatccattgggggttagcacttcaacatacaaattttagccggcgggggggatgccagcattcagtccataacaatcaactatcctcattattgagagttccactaggccttctcaagggttgacaatgatagtgccctgctagctataagagtaaaaaaattttcacatctagaaaatgggtgcacgaatattggtaactgttctaatgtctatgcacagaatttttagaacttgctcgagaaatttgtctttcctgacagtgttgcttctcttaaattccagtcgagggccttgaaaaaaataggttttccatcaagattctctgaatgaataaatgaaatgctctgatattttctttcaatattaagataaagcaaaatgtatacagaattttctattttcagtgtttccaattactgcatggtttggcttattaccatctctaagtctaaccctgggtcataggagtaaagccattgggggtcccctacaaaggatacaaggcagtggtagatacaataagcctgacaattggagtcagatttttctctttcatacaggaaccatggaactgttgccctgggccacagctggctctcagaaaaacgtagaactggtcgaggaaaggaaaggcagggagtccttgattcacttgttatcagaaaattgtctgttcaaacaacagaatgtttgaaaagataaaatcaagtctcaaatgcacagaataagaatgaggggaaaacacctttctctgtaattaaacagaaaagtgtgccatgaagtgataaaacccagtcaacctgaaaatgtgaacatcaagtgtaattgtgcagaacgataaggtaatatgaacagcacaggaatatataggctcacgttggcattttaaagcaatggcactttacctgttcctcatgaaggatttggtttagtctaatcccttgtaggagccactaagaggagaaggcacagtccttttgggatgtaaaatggggaattctttctatgattacaagaatttgtaaattgctcagagttttaggacagcaggttatgtgtctctcaatgttgggtaccatgccaaacgtactttaagagacatagcaataaatagaatgggattcatttttttcttaatgtctggcagggcaaccaaaatgcccacgtttcccttcagtagcttggtattttggtaactaaaaacatgttccagggaactccagaatatgaaacatttcagacaatttgaaactgtcaaaattttcacttctttatgggacaaataaaatctaactttattcagattttaaagtatctcataaaagagtaatactttagatttgtgctgtgctttatacgaattggatgaggaactcttatacatatataagtggattttattttcacaacagtccctatggtagatattgtccttattaagtaaatgagagaaccaactatcaaagatattaatattttgcataagatcacacagatagcggaaccaggatttaatccaactcctctgattctaaaaataggtgttagatgggtattctttccccaaacctatgctgaaaggaggctacatttggagtcagttattgaaagtttaaatatatgtgtatatatatatatatatgtgtgtgtgtgtgtgtgtgtgtgtgtgtgtattcttatatactcatgcatgtagatagttataaagtacatgcttatatgtcaattttatatatacgactgatatataaactatcaatttgtgatagtttatttcaattaagttcaaacatattgggtatttattgactcatgggacttaaaatttctcagaggcattaatttctatgcctttaagcaaaataatgtttagcccgttttagaaagataaaaggctaacatatgttttgtttttgtttgttttgttttgttttgttttgttttgttgagatggagttttgctcttgttgcccaggctggagtgcaatggtgcgatcttggctcacagcaacctccgcctcctgggttcaagcgattctcctgcctcagccatctgagtagctgggattacagacacgtgccaccatgcccggctaattttgtatttttagtagagacagagtttctccatgttggtcaggctggtctcgagctcccaacctcaggtgatccacccgcctcggcctcccaaagtgctgggattacaggcgtgagccacggctcctggccgctaacacatgtttttaaaaaataaacaccattcgagtaggaaaagtgggagaactggtggttcagctagagatacggagatgggagggcaagttgctttctcatgttgccacatctgtaagttacaaatgccatagattaggaatttcaacgttgttgtgtctctctgaggacattctccatgtagtatatgtttcgcctccctgatggacagtaagcatcaaacggttactcctttatatttgaattattttaattctaacatcttgttctgaaaataacgggaatgccataaatacttactgattgattggactgtctcgcaggggagctggcagctagtgtaggctacaagctgccatcatcatctccatgaccatgagtcatcactggaattaccctaaagaggttaataaaacgccttgtttgaaaagcaaacaaaaagccagaagaaacccaaagcaaacagacccagactttgcaatgggtagtgaattttcagtcttaagggattgagagtccttttagtacaatctctcataaacatataacagattttaaaagcaccttggtctgattccagttcacatacctcatccttgcagaatacaacatactaggccatttgaaatgttcctcagtttacttttggaggatctgctgatttgagcaaaatggaaatgaaatgtatatagaaagctcttaatttttttttttttttttttttgagacggagtttcgctctgtcgcccaggctggagtgcagtggcgggatctcggctcactgcaagctccgcctcccgggttcacgccattctcctgcctcagcctcccgtgtagctgggactacaggcgcgcgccaccatgcccggctaatttttgtatttttagtagagacggggtttcaccgtgttagccaggatggtctcgatctcctgacctcgtgatccgcccgtctcggcctcccaaagtgctgggattacaggcgtgagccaccgcgcccggccagctcttaatcttaagaagttcagtttcgcagctccccccccaccaacccccaatcttgaaagcaggaatttggattagggttttttaataaaactttctttttcttattaccatgatgttttttgagagggtacagagaactcattaaaatgttatgttataacttaagacaaaatgggaatgagaatttgcattatataaacaaagtgtatgactaagtaacctgttacatataaagtgtttgactaagtaacctgttgtccctaggagaagtagaataaatatcaacatgtggcaactaacagaatgtgttgtgatcactaaagcagcacattcattgactttacacttcattaagtaggtaacgaattttacaaattttaggacttaaccaggctgtccataatactttgcatcagtaagtaccaaaatctacgatagggcacttcggagttccttaatttaataatattgataatattttgtttacattttgatttaattgtatcatttcattatttttgtgtcctgattctaaatatatacgtcaacaagctatatggccattcaaaacaggtaaactttaaatatgtttttgacatagaaattatgtaacagtcttcatcatgagtataggagtcagatttccaattgaaaatttcatcctctaaaatacttggcatatgtatacagttgtctagttcagacaaaaaagtattgaatataaagttgattttgtaaaaccagaattggcatccttaaggaatacaaataaagggaatcttaagataatataataatgctgatttgaaatgaaaattaataaaattgttattctattttagtatgctaaattggacagatccttatttcattgaaaaattagattcttcagtatatcagtgcactgtgctaataacacaagaagattaaattatgtccatatgtgatttggtagaatttaattataaatataataaatccttcaatatgtacagcagtgaatattccaaatttatctctcatataagttgtgagcaacttaaggataggcaccatcccttaacatacctagattaagaacagtacctagaaaacagtcatcaaatgcttcctaaataaattttcaccttcaagcttatggcagcaaattaaacatagattgacccttttctaatagagacagaatagatgagactgatgacttttttttataaatgtgtaagtctgcaaatatttagtaaggatctaatttacacaaagaaatcaacctagagtgagattattttattcatttcccggaggctgtgactgaattatatttgcaacttgccctaatttttatacttaataatttgcattagtatttaaattatgtgaaggaaaaatataagtttaaaatactgaaaagtatattcacacattcatcaaatgttgattatgtgcttacagtgtgcaaggtattggggctaggaattatgtggtgttccaaggaaaccatgatacagcctctttcattacagtgtttattattaggtagaaaaagtaaaattagtataatattagataggatatatgtgtcataggagtaatataaacaatattttatgaacaatgtatgaaggtataattttgttcatttatccatttatcgctctgtacatccatccgtttattcattgttcattacttcatttaataatactttagtgaccattggaaaagggatttataaaagtgagtaaaatgttaatcattttctaaagaagttgataatctagggaaagacaaatgtgtaccaacaataacttggatataaagcataaattagaggtacaagcaaagaaaaatgaaagtacaaaggagaaaaatatttggctgcatgagagcagggactgtgtcttgtttcatcatagattttccagaacctagatcagtgtttggcacaaagtaggttcagatgagtttgtgttgactgactgtctactgaagtaattgtggaacatatcatagaagaagtagatcagaggctggatcttaaaactgggagaaatacatttcagctccgtgaaaccccagaagtgatatttgacattagaaagcacaaagtcacactctaacagtgacagtactgagtgaagtaagaattttctgcaccccttcttcttcttccactcccattaacccttgttagggtgagaaatagcagctggtgaatggtagagaagactagcaagacagaaagaggaagcccaccatgcccactaccccaggtagtaaaggacctgtccacttccatcctcttctaattgaggaagaaatcatatatgtgagttcagattgaagtattgattaatatattgagctggatattctaattttaatgtctcgatatggagcaggactttgtttccttaatgatgaccagaaaagacatgaaacttacccatattttcacccaagaacagaacagaacaacctacttgaacagatttaaagggagaaccaaaggcagataaagttgtctttattcttacacagcataagtcctgattattcatcaatttatacattttatgaatttaagaaaaaaggaaaggaagactataaagggattcatatcaggatacacatgaaggtaatgtagtcagttttttagtggaaccaaaatattacagtcatcactgaacgaaaatattacaatcattacatcattcactagattaagtgaataaattaaaaatatattaaataaaattaacaaagacatgagcttttcaaagtgtgtggtaacctggagcaataagcagtgtagttggaatgttacctcttaaggattatcaaagaggctggctgttcagtaggacagtggtatggtaaagcaagcttgctacattgcagaactccagagggcaacattctaattatctttagctatggggtctgttcccataggataactataacttagtaggttgacagagcctcccaagaaaccacagcagtgctcaattgtggcgaattacttctctatcccatcaaaatgtcgtgattggacccacaactgtgcatacatttttttggcattttcctgccagaagcatatttacatttctttaatatccagtcatatccttcccttatttaaaaataattattcagagaattccagttttttgtaatcctctcttctatgaattttagcaacacttatatacagatacttgatattctggagaaatatgcttcaagaccatgtggattaacagattttcaaatgccgttatagtatatgtatatactatatatgtataagtatgtgtagtccccaaaatgcgtactttaaaatcctcataatagatctcttacagatgaggaaaagaagatgtagaaaggttacataaagtagctaacaagtattccaaataatattgaacttcagtctgactattccaaaattgcattcttaactctgatttctatatttgttttccattctaaactgtgtattgtgatataagttcctcactaaggctctttttcagggtcttcctaatactaaagtcactcttacaatgagtattttctttacgtgtgaaatccaataggcaaaaaaaaaaacttggcaataaattttaggcattaacctcatgccaagtaattatcagaaggctgtaatgctttgaaacttcacaagtctgattttaagataatggaatgaggcttgcattgtgaactttcttgatgctttacattgcaatatgctgtatagattgacttcctaaaaataaaaaataaaaaaaaagatttgtagagcatactgggaaggtcttgccaattaaaaaccggagattggctgaaggcttgcagcaattgaattttgaatacagatggtgtcaaatcgagtgtttccatagcaacagactcttccttaataacttttagatgggagggggtacataaaagagaaaaccatcttttagcagatgtatgttttcagcatgttttcagattgattttggaagctaatttgtacttaactagtgattgttttaagtggatctaaatattactaaattctcctgaggaaacattttgagaataacagaaataaactctaggaactttataaagacatgaaaagggcacaattttacaaaacctttttttttttggtctggagccaatcaaacagtattttatattgagtatgacctatcaatagtcaaagagttcttgattcttaatgcctgttaatattgaatgtttagaatatgggtaaaatcaaggaaaaagtgctatgtatctcatggatttggaatatcttaatatactctttcttcaggttaatgattatttttaaaaaatgatgatataaatcatttcaggaaggactgcataaagaggtcattgatagagttcatatcatatagcagagttgtcgtagatttaatgtccaatcctcagttttgcatagccaacaactaaattttagtagtttacctagagatgatcaggctctgggagactgattcatgctacacaaactcacaaggcactggtttataaaccatttgaaagaagaaataataattcaaactattattttacaacaagactggcaggaaaatcaataatggtaatgtgttcggggtgtcctccccagtgaggactatccagaagaccaaatgatagattattgttcaaagtgatagaattgggagaagggtaataaagcattatgaaaggatgcttccttaagtgagaaaagctacataaactacccatctttactattctagatgaccttaaaaatattaatagaaacagagaaacagacaattcatctcagatggtacaaaaaacataatagcacatgtttgctccctggcttccttttagattccctgcaagaggttttcccccaaccaccaccatatacagatatacagctttaccttcactctcctattatctgtcacagaacaatataaaactcagatatgttagtataagttaatagttggtagctttatgttaatgacattgctacctgttacccccagattcatctgggttacttcatccccaaaaccctttcaaaacgacatttcccacaaagatttctagtattactggccattcccggacatcttgcttccaacataagaaattctgacataatagggatataagaaggccttgggaatctgtatttataacaagctccccaggctatctgaggctcagccagtttatttttgcagatagctattactatccacaatctcttttatcctattgtaattgcagaagaaaatctttctttctagtttctttgaaatttctggaatgttaggacttagagcctctaggaacttgtacataaaaagagagacttaaagagatatcaaagtagagatagagatagatacagataagtgcatagacatagaagtagacatatataatagaaacatatatgtatacatagaaatagaaatatgccatttagaactcttaagaaatatgtgcactcttaaaatatagtttaaaaatgtaaagaacttgctattaattgaaaatagcataataaacttaaatgaaataaggaccccaaacgcaaatatttctctctgacacaccacacacacacacacacacacacacacacacagacagagagagagagagagagagagagagctgtacaataacaaccaattcctgacccagataaagaaaaaatttttatttatcttctttctcattctattattattttttctagattaaattaaaatggtaattatgtgtaagaacaagcattattgccatataaacaatgcaacaaaggaatcaattgaaaattaagtgaaaataaaaggtacagcttcgttaaagacccagttcttagagcttagtctcaaactctttgtactctgcactcttttcttgatttgactcgattgattgattgattgattgattgagtcagagtctcactctgtcacccaggctagagtgtagtggctcaatctcggctcactgcaacctccacctcctgtttcgagtgattctcctgcctcagcctcctgagtagctgagactacagacatgtaccaccatgcccagctaatttttgtatttttagtagagatgggacttcaccatgttggtcaggctggtcctgaactcctgaattcaagtgatctgtctgccttgttcccccaaagagctgggattacaggtgtgagccaccacgcccagccgattttactctctttagaactgcaaaagtaggaatctagctcatatgcagacattctagaaagtttgatttcaaaagtcttctcaaaagaaagagagcaagagcaagaaagaaagcagagagagaaagcagaagataaaatggcattgtttgaacagggatggaaactgagtaagaaatttggtcactaaacactttagtgtctatcatttaagattgtaatttggttatttatcactggaaagtgattaataatctaaaatgcattttataatactaatactattaaaacattaatttttggagaaagtttattatagattgatttatacttaccactgaatattaaaatgtttaatggaagtagtttcaaatagtatttaatgatatagggaattattacaacattaatgctcaggaaaaaaagtaggatatggaattatttatgccataggatcctaattttgtaaaaaacagagaaaaccagcaaaagaaattataactggaaggaaatacatcaaagtggtttgcagttatcactcatgaaattgaggtgaacttgatttttttccttttatatccatccgtgttttaataccacagacatgctttagatctgcccgtatattgtggctttcagagggtaataaaccattgtgactcagaaatagctaagaatttttatctctcaagaacaaattttcactcccttggggtgtcattatctgttgagaatgcatgcaatagttcaagagccaaaagactctgattcagtaagtttagggtagaaaaaaattaagtacatttttaaaatagagctctggtgtttcaaaggcaatgtgcaaatatacctacttaatattattctaattttttcaggatagctgaaatataaacatctatttttagtaataacacaaatgatggaatgcttttacatatttataaatcattaaggatttgctttttgtttctactgtctggaacatataaatttgaacacaatttagaacaacattcaggaaatatgatttatttattaccttcttgacctttattttatttttaccatctacttttatgtaagtcttttttttcaatcattgtttatttctttacttttccttccacatagaattaaagggagattcgggcttagtgtccttaattcatagttccattgtggctattaaaaggtgaactgaaagcttgcaaacacgtggtaccttgtagataattttctccagtcagacagttagataaaggcctctgaggtttctggggtcattgttgaagctatgttttaaaatcctatatccttctctcattgttggttccttttcacaacacagaagttttcttttttttaatttcaacttttagatacagaaggtgcatgtgcagatttgtcacgtgggagtattgcatgatgctgaggtttggagtacggatcccatcgccatgttagtgagcatagtaactgataggtcgtttttttaacccactcccctccctcctccctctagtagtccccagggtctattgttcccgtatttatgtccatgtgtgctcagtgcttagctcccacttataagtaagtgagaacatgtgatatttggtagaacttttcatttttaagttaaaaaacaaaacaaaatgaggatgagtggaagaactattcagcacagcaggttataaaccaattaggatgatgacgccctgaatggagattttcatgaacatctcatattagctatttcagctttggtttttttaatgttcaaagtaaatagaataatgaagaggctatttaggaaggtttagactgagggaaaaaaatcctttcattaggttccaaataacggttagcttattaaacagcaagaggcagagatttagcagagaaaaaataaaaagatttaaaaaaaaacaacgagattaaaaggtcagtaataccattggaactggcagcatggcaagtttatatcagctatcttttgttttggaacacaactatgctaattctgttctgaacctcttgctaatgcctgtctcaagaaaatttaacatactttatctgtgtgtacaaaaatacctaaggacaaagctattacccaaactgtattcagattgaaagaatccatatagaaatttgcagctaacgtattagtcagtgtatgtaatttctactgcttcacagcacaactctttctaattttcaggagcaatatagcaactgcttgccagccaagagaaaaccataggagcattcttatcattggagccaacattagttctgcctacagtgactaacatagatgcgtttattgctagctggaattttccattggcactagttacatgtaataagttagtgctttcaaatggaccgtggaatataggaaaactagagtctgacgtaaccaaaaaaaaatgttgataaactcagagattatgaaagagaggagaggagtggtttttgtggaaatgatagaaaagcaaaaaaagatggcaggatttggaaaaaagaaaatcaggttagagatttaattagtaaaggagctccttttaataattatataagagtatgagtttagagtaactgcctggctaatatgtacaatcttcaagttcagtcgttttccaaaattctaacttttagcattttttttttgtaaattttaagtggaaatcttccacttttgttgactaacttggctacctgatattttactcaacctcctactttcttgttctctacttcttctgagtctttgcttccacaatgaggtagctcatattccttaagtttcctgtctggttttgcttttttttttttttttaacagctaaaataaactctacaagcatttctatcattttctttacatccaatctcttgtcagccatgtcctaatcactttggtaaagtatcagtgaccacccaagaggttcactttgcttcgtcaaaggaccacctgtcatgctttatctccagagcttctgccttgaaagtaagaataatataacctttcctgaatgtcttatttcaatttcatgcatttgatctgcctcttcagaccattcccaaggctttgcccttgttctttaccctcatggcttcagttattcatcactatatgaatgacagctctcaaactgacagctctggcctctcacctatttcatctattccatatggcaaactgtctatattacatttcatcatgagggataattataattccacattcaacaagaaattgtgggtccgtgttgatttccaacagcaacctttattttttagactatgatagagaaagggtcaactttctctcttacttatttatctcaaataactcaaagtcaagctagaaaagccaagcaagtaatatttcccaacaaagcagctttaagcaaaatgattttcagacacgacatgcagcctgtattgtggaagaagcacagtgacctaggtgtactttgctgaaaagcagtggtcacagtccattagtttcatctttttcctgcaagagagaaaagtatggcagggccaagactcctaagaccccttaaaaaattgtgaggtttttataaccctgttcatttcccatcaaaagcattcatgaagcacctgccatgtaccagatgatgcattctaggcagagggaagaacttgggcaaagtcctgtacattttatcttctaaatcttactaatcttttcttatctttccatctaccacccaccatcaggctgtgcctggactcctatgctaacatcttactctgtttttctgcatcttttttgccctcccctccaatctactctccaattagcaacatgactaatgttttcaagcccagattagacggtgtcacttccctgctttaaacctttcagtggattcccattgcactgaggttgaagaccaaaatctttaccataactcacaaggccactgggagctatgaaaattttcttttttagtttttccttttaattagtgatgcattcaataagtggagtctatcgtgaaagcatagattccaaaggcatgtgaatactcaattatgtaatttacttacagaatgtttattacttcttttttagctttgattttgtatacatcctaactcaatctcagttatataagagattataaaaaagtttgtgatgaatgcatacataaaggaacaaataattaacaaatatataaagacaaatcagtattgaatgaccaaatggctctttatttattaaagaacttagaaaaatatagtcttgcttgagaccaagttctggcaacgtatgtgtgtctttttgtttgggttaaaaagcattagttttatatgttttaaaaggataggatcttcccttggctgcaaatagtataggcaaaatgctattctgtatcttattttaaagaaaataacaatcataccttattatttgctgacagttttgcagtttacaaagcactgttcacatggattaccttattttaaattcctcaattttttttccttttactatgggaattctgtttcaggagaatttccctttaaaattaaggtgattatactattctgttcctgtatttcgtagccatatgtttcaccaaggtattgtctctctccaggtctttcttctctggatgtatagttatgattttccaggaggtaaatgaaaacagtgggagcaattgacagagtgttttttgtttcccataaacccaagcattgcatttaaggagctgctgtactattgtaagagttcctatactaattttaaaagttcatttacatattttgtagatttttaggataagtcatcagaaaaaaattaaaaataaatttacatattttgtattaagctgttttgttacttgaatggggattattggaacgaggaaagaattacttttatctccccatttttcaaatcatttactataacattcatgaattgctgaagtttaaacaatcaaaaatatctgaaaatggagcctaggaagggtaacttatgtctttcatactccttcctttttggtttttctaccagcattttagtctaaaatatattttattttcactgatcctgtgtttgtcttaataatatagtatgtatgttaaatgaaccagaattcattgatctttttttttattattcctctttttgcttttctggagaagcatttgaagaaatcagttcaggctacacttcatcaattcatttcctcatcttccccttaatacaaaagccccattttcactcttcaaaacatttgatcacatacttaattttcatagcattgactaaatgtatgtgtttattttgtttatatattgcatatttgtgatgattttcacttttacagtttaggcatgggtaggaaggacacttacatgagtacttaagttcttggttatgacttgagaaactcacaaggtagcatggaatggcacgtaaacaaggctttgatagggtgaaagggaattatcaggacaaaactgactagtggcagtgacttttgagcagagtgctgcaaactgaaaaggcagagagcattgtaggcagagagaaagcatagacacatgtgagatacatgtgaaatacttagacaaatgtgaggtgtgtggtaacattgtacatacctagggctccttcctgtgtagctgtaaagctggagtataggcatcacaacaggcagcagaagccaagaaactagaaaagtagacaaaggccacgttataaaagatcttgtaggataggtaaagagttttaatactatcctgaaagcagtgtggggtgggaggcatgacattaaggaaatttaataagtgatgaaagaccaagattttcatcttcagaagacttctctggaggtgggtggaccacttgatgtcaggagttcaagaccagcctggtcaacttgatgaaaccccatctctactaaaaatacaaaaaaatagctgggcatggtggtgcatgcctgtaatcccagctactcaggaggctgaggcaggagaatagcttgaacccaagaggcagaggtggcagtgagccaagatggtgccactgcacttcagcctggatgacagagggagactccctattaaaaaaaaaaaaaaaaaagacttctctgactagagttttaaagaaggatggggagtgcaaaaggctaacattaaatcagtggttctcatccctggctgcacgttagaatcactagggggagtttaaaaaaaatgccaatacttggactccaccccaaaccagttaaatcagagccttaatagggcccagacattcgtagtttttaaagcagccctcttgattcaaatgcacagacaaggttgtgttccgctgaactagagagaccatcaggaggcttttaactaaagcaatctagggaagagagagatgaatgatatagaggccagaagagctattaaggagaagtgactcggcatcttcttggttaaagtataaggaagaaagaagaatgaaggataatttgcatgtttctccttcagtgactaagtagaggaacagatgtgtatcagtgattaggggagaggaagaatgaagatgatgtaatccagtttggatatgttggctatttcatagagatttagtaggcgtttggctctatggatacagagttcaagagacaattcttagcttaaaacacagattttactctgattattttagagatagtaaatgaagcaatatacatacatgaactcaccagagagaatatgtaaagtgaaaacaaaaagatcaaagggagacccctagggaatagcaacatttaaggaatgggcctaagagagtgaggagtggccaaataggcagaataaaatccaagaaggaatcttccatattaatcaaaagagaaggtttcaaagagggttcgtcaattggcaggtactgaagggatatctgaaaacataaagactttagactctctaatactgtagcaactttaaggtcactgctatcacctacaaaagtaatttcagtggcaaaagccaaaacgtaatggtttagaagggtatgtgaggtgtggatgtggaaatagtgggtatagactattgcttctcaaaatgtaatcacctgaaaaatcttattttaaaatgcagattttgattcattagctctagagtggagcctgagattctgcatttctaacaagttatcaggtgatgctgatgctgctcatacacaaaccatcctttaagtagcactggtgtaagccactctcccacaaaggaggaagacatagggtttccatcaggggacgcaggtggggtgtaggaccaaaggaaataatactcttttgtcttttgtttggttggttttggttgttttcttcttaaaataaacatggttgtagacggagattgaagacataggaggggtaaaagatggaatcacttctcatagaagatggaagagactggaacattgagtacagcgagggaattaggcatgggtaggagggacacctaaatctgaagagaaggaggtaaggaagaattgaaatacagaaaagttctgtcagtaagcaatgtatggaattgtgctttttagccatagtttctgttcaagaaattgttttccatttatttttatttcttaacttgaatagttggatggtggagtatgcttgtaaaaataagagtgaggccactttgtttttcggggttaatttccgttttctgcactcatcaagtaaaagttgaagtggcaaggtgtagatatgaaattcagtgtgtgctaagggagaaaaaaatgctttttattctacatgattttaaaaatatttatattccaacaaatgcatcaaatttgatgtgcaaatttacagtgatgaatgagttttattgtgtgcattgcatgctggtgacatggtaataaatctgtggtgctagaattataatggtcccctttagcttcgctttaatgaactcttgctgaacacttttgagttgttagtactttatttgctacatttggcacttaattagttaatgactgagatgctggaccgatggatcatctaatgatatgttaggcctattatcacatctagatagtttcttttctgtgacttgtaagtgacctaagatgataaactgaaatatttttgcatagatatacatcaagcttttctcctaacttcaggctttcatcttaagcaatagtttccaacacccccaaaagagaagtcattatgtttttaaaaaaattattcattttaatgtgatcaaataatatcacatttcagcattcacctatttaattaataaaacaacttacatgtttcattatgactggatgttgatattttttcataatctattatcctccaaccagtggtaaaaacccaatcctcctctcacccagctcatctttccgtatgggaagcaatacatacttccctatgttttattaccaaaacaggagaatgagctttctttagaaggttaactcattttctctattagaatattcagcatacttttaaggaggtaatctggtctttgacagtctgttgattagaaaattaagagacctgcctaaattccatttccaactcctctccatacacattgtgactttgagcaaaacgttttgccatttccactcgtataagttctgtttagtatctttaaacttccatatcccacagatggtatttttttcttcattggaaagtggtgttagtgattcagaaaactgcttaaataatacactgctttgtgttttctgtgagagaatttttttttttttttgagacagagtctcactatgttgcctaggctggagtgcagtggcgcaatctcggctcactgcaacctctgccgcccgggttcaagcgattctcctgcctcagcctcccgagtagctgggattacaggtgcctgccactgcgcctggctaatttttgtatttttagtacagacagggtttcaccatcttggccaggttgatcttaagctcctgatctcatgatccgttcacctcggcctcccaaagtgctgggattacaggtgtgagccaccgtgcccagccgagagaacattttatctaacattctattttaaaatttttcaaatacacagaaagctgaaagaattgtacagtgagtgctcatgaacccactctctagattttgttgtatcactttacttctttctctacccgccaacccctattattttctgatgcccttcaaagtaagttggtgacatcggttccctttacccctaagttcttcaacatgcatgtcattaaccagagctcaatatttgttcacatttcttttgtttgtttgtttgtggcaaaatttgtatagactagaatgtgtaaatctcatgtgtattatgaaatgagttttgatgaatgggtatacctgtgtgacacatgcctctcttaagatacaaaaaaatagccttggcccagacaggagggaacattttttaggttggcttgagtttcctttaactgacatgtagcatgactgaatatatgaccataagattgccaagttgaaatttaccaaaggtccatccaggggaacagtatggctattgatacgtcatttgttcatctaggcactgggctgggtgagttcttcacaaaaaccttgtaaggtgagctttcagctctgacagaggcatcaagaaacgtatttcacaaactgttagagctgaaaacatctccagggatcatccaatctatcctcctttgctttatgactcaggatttaagaagccccagaaaagtccaacagtgttaccaaagtacacgattgcctatttacgcccctataattgagagctgtctaggggtcaggtacttttctcagtgccttgtgtacattatttccttttatctttctagattattaattttcttgttattatccccatataatagaggagtaaacagtgtgaaaatagcactaaactgttgatcttttccatgttccaaactaaccttaaatgttaggctaatattataaaattttaaaatttagtcatttgttctgggtctggcttccatgaacttaaccaaaatgcttggctgtttctgcattctagctttttgggatttagagaaaaagcaacttggtcatcatagtggccaggatttatttatgtgccaataactcccctctgtttttagctttttgatctgttacatctcagatactttattctctatttgtaaaacaaccacattcctccttttctatatctaagtgaaaaaaaatgcccgttcatactagctacatggttagcatatatgtttcttcctctttgtgggtttgagttgaaacttcttttgcaaagcttaactatagataggtcttccacagaaccctgtttaaatgccttgtggaagtagaagggacatatcttaatattccttataatctgtgttattatttggactttcctcagttccttatatgtctttgtatgtcaaacattgagttatgcttacattactctaggtatagttgtgtcctagctttgtacaaggttacaataatggtggtttccttgttttcagcttcattcttgatcatgcctaacattttttgatggttttagcctcggagaacagtctactgctatttctccctttttcctgatcccaacaaatagtttagaaatctttgtcttaactgcaattgggatcatttttcctttagagttgcccacagttagtcatgtccgtcactcttcactcactcaaatgacctcaaaagatttacctgcaatttaagcctttcaccttggcattttctacctggaactctggcgtactctgtgggatcagtgagatccatagtgtgcactccctagcagatcgtgaatgtttgttgataactataattcattgtttagtcttgtctatacagagaagcagtagcaccttgctttagtaggatcctttatgcttttattcattattgaattttatcttcacaataattctgtggttctgcagttgtcattatttcagtttgggagttgaggaaactgagatcgtggcaaatcaacttttcccatttaaatccactatttcatcgctaatccagggttataacccaagactaactgctagtcaaagttgctttctaaaaatcagttacacagacttctaattctcgtgctgtacagtcagtgcagaaattgcaacagaactgttctttgttctgtagcaatgtgtattcaaaaggtaatcatttcttgtgtataaataacattcctccctaagagagatgttgtgggaatttatatcagtcaagaatgtatatcgataattaaacatagctagtctaaaaaacttgaagtgaaagattggttcgtattcaatcaactgaactgtttctttctctgcaatattgtggttcttgacatgattgctgagtttccaatttgacacttctggaggttcgtaaatcaggacacatgctgggtctcagtctgtcatcctgagtcttagcattggttatttatttccctttattacccaacatctatttactgcacaaattagtcgagaagctttccatgacggacctttgtgagaaaaaaaaaatgtgtacattgggtagctcttcaattacaaacatgcacagattgtctgggtttatgtgcatatactttattattatttcacttttgtatgtcagatgaatttggtgtaaatgtaaatctaacaatatgggctctagtggccaaatacattgccataatatgtttttgatctgtcagtctcctgggtgaagtgtcgcaagtgtggtaaaattctgtagtataaattgatgctcagttatggacaattaccaggtctatatgatgtcagactaccacactgatccacttttaggataacagcttcgctctgatgatcttcagattttagatttgctttcattccttgacaaaatgaaatacatttaaaacttctaaaattgtcttttgtatatatttctgcagggtctactcttgggactactataacaatcaattgtactgctttgtttcttttattaaatagcagaatagctgcttgattcgtctgtatgtgctgatgtgtgtctgtgaatctagtccagttcactgtccaataagaatttctgaaatgttctttgtcacatcaatgtacagtcaaaatcgtattgtgtttgtagcagaatgattgcatcttttattattcacagcagccaaaatgacacatatttcacacgtgacaccttttttaaaaaagatgaattgtccaaagttgtatgtagaatatatttcacaaatcaaattccctatttaataaatggtgctgggagaactggctagccatatgcagaagagtgaatttctataaatagaatgcaactgtgtaaatagcatccaaatcaagaaacataatataatatagccagaagctcaggatcccccttcatgtcttctccagtcatgaacatttcacaagggtgactactatccttacttcaaaagttttctattactttttcctgtttttgtgtattatatgaaggaatcgaacagtcatatctacttgtctgtggctgtatttttccccccaacaatatgtttgtgagattcatccatattattgtatgtagttgtggattgttcacttttcttactgaataatattctattgataccacagtgtatttacacatgttgatatagatgagaaattgagtagtttccaacatgaggaaattgctgtcaacaattctgcaatccatagccatgctatcaacagtctagtacatggtttttggtgaatatattaataactatgcatttctgttggatatacacctgggagtggaattacaactcaaataatattcattttaaaaattttatttcgtttttagtcgacaactatattatggggtacattgtgatgtttcaatccatatatatacattgtggaataatcaaatcaggctaatagcatatctatcacctcaaatacttctcatttttgtggtgagaatatttaaaatcctcctttttagctatttggaaatatacaatatgacaatattagctatagttcctgtgctgtgcaaaagaacaccagaacttattcctcctgtctaactggaactttgtacccattgataaacgtctctcatttttccatccacccaccactgcagcttttgatcaccaccataatactctccatttctatgagttcaactttttttaaactgcacatacaaatgagattatatgatatgtgtctctctgtgccaagtttatttcacttaacctaatgtcctccaggctcatccttattattccaaatgacagaatttcctaggtttttaaaattttttttttatttttaattttttggggtacatagtaggtatatatatttacggggtacatgaggtgttttgatataggcatgtaatgtgaaacaagcacatcatggagaatgaggcatccatcctgtcaagcatttatcctttgtgctacaaacaatgtaattgtacttttagttattttttaatgtacaattaaattattattgactatagtccccctgttgcactatcaaatactaggtcttactcattctttctaactattttttgtagccgctaacaatccccacctatcccctacctccacactaccctttgtagcctctggtaaccatccttttattctgtctccatgagttcaatagttttaatttttagatcccacaaataagtgagaacatgcagtgattttcgttctgtgactggcttatttcatttaatgtaatgacctccagttccatccaagatgttgcaaatgacaggatataattcttttttattgctaaatagtaccgcatcatttatatgagccacattttctgtatccattcgcatgttgatggacagttagcttgcttccaaatcttgcctgttgtgaacagtgctacaacaatgtgagagtgcagatagctcttcaatacactccctccttttcttttgagtatgtacccagaagtgggatttctggaacatatggtcattctctttttattattttgagaaacattcatactgtctttatggaggccgttactaattcacaatactaccaatagtggataaggtttccttattctctgtatcctcatgaacacttgttatctttcaactttttgataatagccaatccaaaagatatgaggtgatatctcattgtgattttaatttgcattttttgatgattagagatgttgagtattatacatatatgtgtgtgtatatatatatatatatatatatatatatatatgctgtttgtcatcttttgagaatgtctattcatatatttgcccatttttttattagggttatttgttttcttgttattgagtagcttgagttccttgtatattttggatattagcaccttatctaatgtatgatttgcaaatatcttctcccaatctgtgggttgtctctttattccattaattgtttcctttgctgtgcaaagctttttagtttgatgcaatcttacttacctatttttgtgttgattgtgtttgggggtcatatgcaagaaaccactgcccagaccaatgtcatggagctcttctcttatgtttttgtagtttttagtttcaggtattacatttaaggctttaatccattttgagttgattcttgtataaggggtgagataagggtccagttttattctgtatgtgaacattcagttttcccaataccatttattgaagagactgtcctctccctattgtgtgttcttgctacctttgtcaaaaatcaattgatcaaaggtgtgtaggtttattttagtcctctttgtcttattccattggtctgtttttatgtacttgccatgctgttttgattattatagctttgtaatacattttgaaatccagtagtgacatacttccaattttattctttttagtaaagacagctttggctatccagggtcttttgtggttccatgcaaattttaggattttttaaaaaaaattctataaagaacaatatgcagattttgttagtattgtgtcgaatctttagattgctttatgtttaacaatattaatttttccaatttatgaacacagaaatctttccatttatttgtgtcatcttcaatttctttcgtcagtgtcttatagtttcaacacgcagatctttcactttcttggttaaattcactccaaatattttttcatgctattataagtgagattgtttccttaatttctattttagacagtttgttgttattgtacaaacaataacaattgttatcgctactgatttttgtaagttgattttgtaccctgcaactttactaaacttgtgtatgaattctaacagttttcagtggagtccttaggatttgctgtataagattatgtcatcagcaagaaggggcaattttacttcatccttttcagtttggttgccttttatttctttctcctgcctaattgctctggctaggactcccagtactaagttaaacaagggtggggagagtgggcatctttgtcttgctcctgatcttagagaaaagccttctacgttttactgttgtgcatgatgttagctgtgggcttgtaatttatggcttttattcttttggagaacatttcttctatacctaatttgctaagagtttttctcataaaaggatgttgaattttgtcaaatgctctttctgagtttattaaaatgatcatacggtttttgtacttcattctgttatatgttgaatcacatttattaatttgcatatattgaaacaaccttctatcccagggataaatccctcttggtcatggtgaataatccttctaataaactattaaatatggttcactagtatttcattgagaatttttgcatctaatttcattcgtgatattggcctatagttttctttccttgtagtgtctttgcctggctttgggatcagggtattgctggccttgtaaaataaatttggacgaatcccttcctctttagttttccaaaagagtttgagaaagatttgtgttaggtcttctttaaatgtttgtagaattctcccatgaagccatctggtcttgagctttcctttgatgtgagaacttttaaatactgatgcaatctccttaactctttccttagctgttactggtcttttcagatttccaattttcattattcagttttggtagattatgtatttctaagaattcatccatttctgttaggatgtccaatttcttggtatataattgttcatcgtagtctcttaggatcctttgtatttctgtgttatcagtcataatgtcttctctttgatttctgatttgatttatttgagcctgctctcttcattcttagtctagctaaggatttgtcaattgtgtttagcttttcaaaaaaccaacttttagttttattgactttttttctattgtttctctagtctctatttcatttatttctgctctgatctttgttattttcttctttctgctaactttgggcttaattcattcttctttttgtagtttcctgaggtataatgttaggtatttcatttgagatatttcttcttttttgatgtaggaatttattgatataaacttccctcttagcactgcttttgctacccccagaagtttttctatgttgtgttttcatttctgtttgtctcaagacttttaaaaaatttcctcttgaatttcttcttttgacccaataattgtttaggagcatattgtttagtttccacatatttcttaattttatatgatttctcatgtaattgatttctaattttatattgtggtcagaaaagatacacgatgggttttcttaaatttgttgagacttgtctgtggcctaacatatgatctatcctggagaatgttacatgtgtacttgagaagaatctgtattttcctactgttcagggcacaatgttctgtatatgtctgttaggtccatttggtctaaaatgtcattcaagtccaatgttttcttatgaatttttctgtctattgcttaaagtggaatattgaaattgcctgctattattatgttataggctatgtttcccttcagatcccttaatgtttgctttatatatttaggtgctctgatttgggatgcttatatacttgttatgtcctcttgatgaaataacctttatcaatatataatgatgttctttgtcactttgaacagatttgacctaaagattattttgtctgaagtaagtgtaactaccctgctctctttttgttctcatgtacatggagtatcttttttcatccctttactttcagtctatgcatgtcctttaaggtgaaatgagccacttgtaggcagcacatatttgggtcttgttttttgttgttgtcgttaatccactcaaccactctatgccttttgattggagagtttaatctatttacattcaaaataatgatggatgggtaaggacttactagtgtcattttgttcattgtttcctggttgtcttacagattctttgttcctttcttcctctattgctgtcttcctttgtgttttgatggttttgtgtagtagtatactttgggtcttttgtttttatcattcatgtatgtattataagtttgtgctttgtggatactccgaggcttacataaaacattttataagctgataataacttaaatttgattgtgtgcatatactcaacactttgactctccctcctcccacattttatgtttctaacatcacaacttacttttttttttaattatactttaagttctagggtacatgtgcacaacttgcaggtttgttacatatctatacatgtgccgtgttggtatgctccacccattaacttgtcatttacattaggtatatctcccaatgctatccctcccccgtcccctcaccccacgacaggccccggtgtgtgatgttccccttcctgcgtccaggtgttctcattgttcaattcccacctatgagtgagaacatgcggtgtttggttttctgtccttgtgatagtttgctgagaaagatgatttccagcttcatccatgtccctacaaaggatgtgaactcatccttttttatggttgcatagtattccatggtgtatatgtgccacattttcttaatccagtctatcattgatggacatttggattggttccaggtctttgctattgtgaatagtgcagcaataaacatacctgtgcatgtatctttacagcagcaggatttataatcctttgggtatatacccagtaatgggatagctgggtcaaatggtatttctagttctagatccctgaggaatcgccacactgacttccacaatggttgaactagtttacagtctcactaacagtgtaaagtgttcctatttctccacatcctctccagcacctgttgtttcctgactttttaatgattgccattctaactggtgtgagatggtatctcattgtggttttgatttgcgtttctctgatggccagtgatgatgagcattttttcatgtgtcttttggctgcataaatgtcttcttttgagaagtgtctgttcatatccttcgcccactttttgatggggttgtttgttttttcttgtaagtttgtttgagttctttgtagattctggatattagccctttgtcagatgagtagattgcaaaaattttctcccattctgtaggctgcctgttcactctgatggtagtttcttttgctgtgcagaagctctttagtttcattagatcccatttgtccgttttggcttttgttgccattgcttttggtgttttagacatgaagtccttgcccatgcctacgtcctgaatggtattgcctaggttttcttctagggtttttatggttttaggtctaacattaagtcttcaatccatcttgaattaatttttgtatatggtataaggaagggatccagtttcagctctctacatatggctagccagttttcccagcaccatttattaaatagggaatcctttccccatttcttgtttttgtcaggtttgtcaaagatcagatggttgtagatgtgtggtattatttctgagagctctgttctgttccattggtgtatatctctgttttggtaccagtaccatgctgttttggttaccgtagccttgtagtatagtttgaagtcaggtagcgtgatgcctccagctttgttcttttggctcaggattgtcttggcaatgtgggctcttttttggttccatatgaactttaaagtagttttttccaattctgtgaagaaagtcattggtagcttgatggggatggcattgaatctataaatttccttgggcagtatggccattttcacgatattgattcttcctatccatgagcatggaatgttcttccatttgtttgtgtcctcttttatttccttgagcagtggtttgtagttctccttgaagaggtccttcacatcccttgtaagttgtatttgtaggtattttattctctttgaagcaattgtgaatgagagttcactcatgatttggctctctgtttgtctgttattggtgtataagaatgcttgtgatttttgcacattgattttatatcctgagactttgctgaagttgcttatcagcttaaggagattttgggctgagacgatggggttttctaaatatacaatcatgtcgtctgcaaacagggacaatttgacttcctcttttcctaattgaataccctttatttctttttcctgcctgatcgccctggccagaacttccaacactatgttgaataggagtggtgagagagggcatccctgtcttgtgccagttttcaaagggaatgcttccagttttgcccattcagtatgatattggctgtgggtttgtcataaatagctcttactattttgagatacgtcccatcaatacctaatttatcgagagtttttagcatgaagggctgttgaatttggtcaagggccttttctgcatctattgagataaccatgtggtttttgtcgttggttctgtttatatgctggattacatttattgatttgcgtatgttgaaccagccttgcatcccagggatgaagcccacttgatcatggtggataagctttttgatgtgctgctggattcggtttgccagtattttattgaggatttttgcatcgatgttcatcagggatatttgtctaaaattctctttttttgttgtgtctctgccaggctttggtatcaggatgatgctggcctcataaaatgagttagggaggattccctctttttctattgattggaatagttttagaaggaatgataccagttcctctttgcacctctggtagaattcggctgtgaatccgtctggtcctggactttttttggtttgtaggctattaattattgcctcaatttcagagcctgttattggtctattcagggattcaacttcttcctggtttagtcttgggaaggtgtatgtgtgcaggaatttatccatttcttctagattttctagtttatttgcgtagaggtgtttatagtattctctgatggtagtttgtatttctgtggtgtcggtggtgatatcccctttatcattttttattgcatctatttgattcttctctcttttcttctttattagtcttactagcggtctatcaattctgttgatcttttcaaaaaactggctcctggattcattgatttttttgaagggttttttgtgtctggatcttgtaggtatgcttcattgtttcttattatttttttcttttgtcttctctggctgtgtattttcaaataggctgtctgcctacaagatccagaaaatagcctcaaaagggtcaatctaagagttattggccttaaacaggaggtagagaaagagatagggatagaaagttgatacaaagggacaatatcagagaacttcagaaacagagaaagataccaacattcaagtacgacaaagttatagaacaccaagcagaattatctcagagactacctcaaggcatgcaataatcaaactcccacaggtcaaggataaagaaagaatcctaaaagcagcaagagaaaggaaacaaataacatgcagtggagcttcaatacatctggcagcagatttttcggtggaaatcttaggccccgggcatatccagagatgctgtctgagggccagtcattggagtcaaaaaccttagcagtttacctcatgttctattctattgtggctaagctagcactcacaccacaatataaagtgctccctgctcttccttgcccttttaaaaggcagaggatcctctccctgtggccctcaccaccatgagggttctgcttggcctccactggtgttcacttaaagcccaagggctcttccatcagcttgtggtgaatgctgagagaactgggacccatattttagggccttgggctcccctctggcccaaggcaggaccaaaaatgctgtccaagaacctaggccaggactcagaaatcccagaagcctgcctgcttctctgcctttctgtggctgagctggtacctaaggggcaagacaaagtcccctttacttttctgtctacttttctcaaacagaaggggtctttcaccataaccaccacagctgggaatttgctgggtgacctatgaagccagcacatctcagaggccaagtcccacagtgtactccctgggtattgcaactggttattcaacgttcaaggcctctttagttagtagctgatgaatcctgataggactgagtccttccctttaaggtagcagattcccttttggcccagggtgtgtctagaaatgctatccaggaactagggcctggaatgggggcctcatgactctgcccatgccccatcctactgtggctgagctggtatccaagatgcaagacaaagtcttctttacttttcgctctcttctccttaacgagaagtaaggagtcacttctgttgctgcaagcttcactgctgggagtaggggaggtatggtgcaaccactcccttagccatgccagctggtgtctccctaggtcatgtgggagaccctaatccactggcttcaatatatagagggacgtttctaaattatttatctgtaatttgattaagaagatagacacaggcaataggatatgccaacagattctctctaacctatagttattttaagaaagttagggaaagagaggtcattgattagttttggcttactgaattatttgaccctcccatatcttttaatttatggattttatataaggcacagatattctactagtaaacatgacattaaagatgttttatacaaatgaatgtggttgatacaaaggcattaaataagaaacaaaggaaattcagaggacatttgttcgcctggaatagagatcattagcataagcataagaggaaaataaggaaggaaatgggaaagtcttgagtccattttcaaattatgaaaacttgaaatgcaacaaacaaatagtggttacttaagaagaaagactgaagatgctgggcaaaggttaactttagaaatggcatttttatatcattataaagagaaagtggggataatggaaataatctacatgtacaactcatttgacagacatttattgaaggtattccaaatgccaaacactagtttgtgcactaaggatgtttttaatttttactttttactttatttttattttctagcttcttccgctttgccagagaaggatttttttaaatggataaaatactaacttaggctagcttctttcagaaacagacctttaaacaatgattaatggtgaaagtggtttggttgtaatgtgatcccaggaagtaccagtaggagagtgggacaatgagataataaatgaaagaagccaataattaagccagttatggaactagttattgctttgggccactggggtttgatcctgatgaaggagctctgggagatagtaaacaaacaaacaaacaaaaaacatgcctcaaagttgtcaaccacaagggggtaaaggcaaggaaccagggctaactattccaactcttatccatcattggctaaatgcttcctggtacataaactttccagcacttctggccagcgcacctagcaagctgaggaaaatctctcaggtttgcagtagggcaaatgcttgtactaggacactgctggcatatacttgaaggatgagtgccaacggcagatagatgggccctgacagcatcttctacagattctgtccttgcctttgaggcaaggacactgtctagagtcagagacagaaatgtaaaatgtaaaaatgtaaatcatagtagcacacagtacaagttttaaaatcttaacaaagtgttatgggagaaccacggtgagagaaaatgactgcacatatgagagcaggggaagtctttatatgtgatgatgacatttgagtgggtgttccgttatcaaagatctacttaaaagggaaaaagagtagaattattttaaaccatggatgtaaccaggcgtggccaccctatatgtgaatgtcctgggataattttgtccccagatgtctctctttttgagtgtcattttcatttatgtattcataatataaagaaattgaatagaaagaggtaaacattggtggcaaaaatcccttcctacccataaggctcacagaataatgttgtctaaatgccataacatttttggtaagttttggttctatgggctttggaaattttttatgtaggaactcctccaaggtgatataagcattcagtgtatttatctagataccctagttaaagctactttaagcaggatcaaagtcctcttttaaacttttgtatttgaaagctattcccatgtacaattcccatgattcttgtacaattcctaggagacctttgtttacatcaaaagagtttgtctctctctataagttagaacttgtacattgtagtaatggaaaatccatttcaaagtagcttagacttactcagacaaaatgtattgatcagtgtcattaaacagttgaaagatagacgaggcttgattcaggaattaaatagcatgaccagattctagttttccttctccattgcatggctctgctccccagtatttgttccgtttaattcctcttaattgttctaagatggatatcaggatactgcagaactacgtgctttctcatccatcttaaacaagaagcaatgggttttctcttttagaatcacgaacaacaacaacaacaacaaaaatcctagagttgtttcattggttctgattgaccttacttggaaccataagtccatctttgaattaaccactaaagccagggagatgagttaaaactaagtacacaccatccacagagcaaagagaggtctattgtgggaaaactgcacaaatggaaaaataacaggggaaacacaggagaaggaggtagttagttaatgttcaatacacgcaccttctcagggacttttcttccatctggcatcatctttgtcttttgaccattttccccaatcaatacctatattcatactcaagttttccatatttgggaaaaaacttctcttgacaccaaactcccctctgacttccttcttataatgatctatggttggatagtctacaatttactgtccttactttttcataggtattttttaatctcctacagtaagatttctaccactgcactgaaatcattttgtgtatggtcttcagggaattccatgtggccaaagccaatggatacttttggcatgggctttggaggtctaacttcttgaatccaagtgtcggctctaacaatcactatctatgtgaccttagaccagttatttaacgctgtctttatttcctcatttgttaaatgaggataattgcagcaatagaaaaagaacgtaaacaattatacttataggattgtatgatgattaagtgattaatgcaaggaaagaacaacacagagcttcagacagtgtagatattcaaataaatgttagttatgatttttattatgtcttgtgacatctatgagatttgaaagtgttaatcactcttgtgtttttgaaaatctttcttttccatgttctataaaagtacactttcttgatattcctcctccttctctagtctttcattcatcttatttgctctttgtgttttatttattctttttacgttgtattttccaggagtccattcccagcccggtgttgggctcagtctatgtgccatataaatgagaatgcacttgcatttgaggctttgctttttatttctctgtagtgacggccaatcccagatttctgtctctcccaaaatacacagctatgctatagatccttcagtcctcctgactaaaatgttagttttatgtgtgtgttcctcacaacctcccagtgaataggtccaaaactgaactcattatcttctccatgctcactctgcattctttggataggcagtgaatagcaccactatctaacaggcacctaaaccagaagccaggtaatctgtcttaaacccttttgttttccaagttcttatcataatggctggtgtctaacagatggtaaataaaatagagactagctggctacatggatggatgtgtggggatgcacagagggatagatggattattgagtgagtctctagcctataaatatttttaattaactaataaattatgataatgtacagttgaaggtcaagggtgaaaaagcataccctcagtgggatgcacaccccaaggagccattttaacttgctacataacacacatatgaccacttttttgctgaaagccttctattattgagcaagcattcaaatcccatgtttgcctgaaataatggttcaggttataaaagtttccttctttttccaggattaaaattatcttcctacataataggaagaactgctttatcttttcctaatatctagagatggccttttaaaaatatagactgttttccctattgaaatgaactgtaggatgtacaaaatatttactggcatgaatcaaaagagcttgctatgtttatgtgaaaaccactaggcattctaaaaaatattgctagcatagtaaaatgttagtaattaagactaacgaaagcgaaggcaaattggaatcagagactatttttaaggaatgtcaactgtattattttcaaatacacatggtacataacagtaggatatgagaaaaagtcccaagtatgtgtactaaagtagcctgctatgataagttgaaaaagggtttgtaattggaatatccacagaatatttcagaacacttaaagacattttcatttacactttatacagctttcttataagagcatttacaccatttattttataaaccaaagattaattagaagactaaacaattacaaggcctcaactacgaaagctgttccactacctagtggaacaacaacaatgagacacacaaaacaatggcgttcaaagattagagagagacttacggttaaacagaggttgacatgttaactgaagttgcaatataatatgtcgactagttttgcaatacatagcaaacacccaaacagaaataaacctgataaaaaaacagtagtctataatgtgtgccacttactgagttttaattattctggggactatatttttgatttcatgttacaatcactagttttgtggggtctttctagtcctgatgcttatttacaaaatatctgaagtatttctttctatgtatttatttttgagatggagttttgctctgtcacccaggctggagtgcagcggcatgatctcggctcactgcaacctctgcctcccgggttcaagtgattctcctgcctcagcctcctgagtagctgggattacaggcgtgtgctaatttttgtatttttagtagagactgggtttcagcatgtcggtcaggctggtctcgaactcctgacctcatgatccacccgctttggcctcccagagacctgggattacaggcgtgagccaccgcacctggccatctcaagtatttctttaacttataacttcacataactttgtggaggcaacagggttaattaaaaaggactttacttacataacaaaataagaagcatagttttatattcctgtgccatatacattttgtttgtccatctgtagccattctttgaccttctctcccttgctctttattctgggaggctgacctctgtcatcattgggctcccatgccctttggcttccagttggtttaggcacccaagagccctagaaggaaattgaagacaggaggtaaagtgaggtcaagatatttattctcctaattccctccctttgaggttgccacaggctgactatgtcctttgacaaaaggttattgctcttctcagggtggtttctcattccaattctctgcttttggccacttttccctcccctcatcccttgggcctagatgtagtaacagctctactgttgcaaggttcttgtattatctgtgatggtttcttataccctgcttatcttgtgatttgttgctttgtagataaacctctcagattatctaggcaagatcatagaagaacacgtatgtccagctaagatattccagaagacagtagggaaacattgaagggttttataagagggagtgcagtgatcagatttatgttagttttaatctttaattggggtagaatttacattctaaaacagagatttgggtctgggaggatgatatagagcctcttatggatgtgagggcaaaaaatgatagaggtttgcagtgccaatagaaagaggaaagaagttatatatgagagaaatttgtaactaattatatgaggtgttgggtgacgcttaggaaagaatctagaatgtctatcaggtttcatgcttaagggataaagtagatggcagttttattacttgttttctgtattatttttatttcataaaaccagcttagagaagttgcatagaaaaaataatgtagtcctgtttattttaatatttgaaaagaacatatttcagagtagaatctatatagtacctccctcttggacttccaatgataccagtgatagcctcaatataagccagtcttacaaaatgcacccagcgtgaattcttaggtattgttaaaagaagttggccaggcgcggtggctcacgcctgtaatcccagcactttgggaggccgaggcaggtggatcacctgaggtcaggagtttgagaccagcccggccaacatggtgaaaccctgtctctattaaaaatacaaaaaaaaaaaattagctgggcatgatggcacgtgcctgtagttcctgctactcgggaggctgagacaggaggatagcttgaacccgggaggcggaggttgcagtgagcggagattgcaccattgcactccagcctgggttacaagagcaaaactccatcaaaaaaaaaaaagaaagaaaaagaagaagtttctaatacacttatcttcccttgggttcactcagaagacccttggaaaaggttttaagagcaagtgatttatttggggggtaaattaatcagtagaagagtggaaaaatgagacaggtgaggcaaggcagccagtaaagagtggtgcattatcaagccagctgctgttgtgggtcactggagctttatcccttgggaaactctggaacccttgtaaaatacatgcctcagagttatttcccctagcatcaagggagctagtgtaacaatatcccaattcctacaattagtcattatatacaggctgcctctgggagctggaggggaggcatcagttgcctggtatgtctagcctgtcacatggatggcaaagcaaactcctgtggcaacagaaagccttcaggcaatgaaatgctggcactgggaaatcaggctgatgggtgctgaagtggcaaggatgaggggatatggatattctgctgtagtgcttttctaacagatgattcatatttggttctagggatcaagaattgagttaaaattttatatatatgttgatgttctatgtcaccttcaggaaaataatttaacagaaactaatatttgccatcaaaaaagcaaagaatcctgttgttcatcatcctagccataacacaatgaataattttttaaataagcaacataaatgtgagataacgtttggaagttacatttaaaatgtctcctccagactagcatttactactatatatttatttttccttttattctagttgaaagaattcagaatcagtgggatgaagtacaagaacaccttcagaaccggaggcaacagttgaatgaaatgttaaaggattcaacacaatggctggaagctaaggaagaagctgagcaggtcttaggacaggccagagccaagcttgagtcatggaaggagggtccctatacagtagatgcaatccaaaagaaaatcacagaaaccaaggttagtatcaaagatacctttttaaaataaaatactggttacatttgataaaattataccatagattgtaatttaatgatgtttaatgtaaagttattaacagaaaatcacgttaaagctgaaatgaacagtagactttgtatatttattttcttagagacagagtctcactgtcacccaggctaaagtgcagtggcacaatcatagctcactgagccttgaactctggggctcaagcagtcctcctgcctcagcctccctagtagctgggactactagccaggcgtgtaccaccacgcctggctaattttttaaaaatttttgttttctgtagagatgggttcttgaactcttggcctcaagcaattctccttccttggcctcccaaagcactaggattacaggcatgagttagcatgcctagccagtagacttttgagtcaaggtagagaatagaggaaaattgacagctaatgtcaatgttaaagttaattttgtttagtaatctggatatagttggctggttttctgttgcaccatctttaagatcacttcaaaattggtatacgtatttatgtagttgcatgaagtcaaccattcgggcttaattccttcctagaaaaagtaacaggtctactctttcatatcttatttggaggccctggatcaagaaatgggggtgagtgggtatcaggattggggaggaataaggagtactctcactttctccccccattctcttacctccagcccagctcattcttctcttctttctctttcctctgaaatttcctcaaatatctgtctgcttagtagtctataattcctcaggataaaagaaaaaggaaaaggaagaaaattgcttaataactatgttttatcaagcagcatgcatagtgctttgcatgcgtttaatcccttcaaacttagtatttactagtcagtttgaaaagcccttaaatgttaaacaatggttaagctttagggtattttgagcagggaagtaacatggtaggaggttgatcagattgggcacttgatcaaaaccctctatagatattttatctgacagaaaaggccttttgctaaaccagtatctgattctcaaattggttatgtcatctaagaaggaaaccgtatcattttcttggatgaaatggcttccatttccaaattagtcaggttaggctatgctaagctatagtaagaaatgaactctgaaatctcaatagcttaacacaataaagactgctttcttggttatatcatagtccagtagaggttgacaagccattcttaggagctgtcccccaacatggtcacttggaaacccagacttttccaattttgtgacacttgtcattttcaacacactgccaaaagccactgcagaaaaggaagacagaatgtggtcagtcaatccatggtgttttatggccaggcctggaaattatgtatatcacttccaccacatcccatcacacagaacttgttctcgattgaatttcaggaagagttaatggaattagtgagcttttagccaatctctgtcatagccattttatcgaagggacctgagctgctatgaggacaaggttttagtttatatgatgaggatgttagaaagccacatagaattttacagtcttatcattagctctgttggagtcaaaatctaggtgaataaaaattctttcaagagacacatgttaccactaatggttttttcaatggatgagcatagatgaattaggaatctccaatggtcattttcctaattcctggtctgactatgtaatatatagaatcatgtggttattcttgaaagctctagtcatattcgtgaggtagtcagcatgttatgctacttctttttcttctctataagtttcggatactatgaatctattggatcacaaaccaaagtagttaactggtaagaaggtataagcagaaaatacgaagtttggactggatccttgagttagatgagaagaaggagagatgagaggcatacagtgatagatttgactagggcaagaggactctggtagttagcaaatgagaaataaatttaacctaagaaaatcctaaagtgatggtaagaatggttagggtttaattgctcttagaagagcaagtagctttaaataagagacaaaaatatctgcagaaggaaatatgaaagtagaaaacaaaacaattgcattgtcaaaacatgtaagatgttttaatcacctaaaataaaaccagaattgtattataattgctatcctttgtcaaacttttgaaattaaaaaaaaaaaacgctttggaatggtctaaaactacatcataaaaatggctcagccactatctatagagattgacattttttgtttgtgctctgtgtttaggaatttaatgatgtgtattgctgcagattcaatgtaagttcccgatacagataaagatggccaaagctgtaattttttcatccatttcttgaatgatgtatgctaaaattaaagtaatcctaatgttaataataacttttagtgaatgcttgctgtgtgtcaaaaagtatgctagtcactttatatatattggtttatttcatcctttcaaaaacactctttgaaaagtactcttattattcttagtttgcagagaagaaaactgaaggctagagaagttcagaatcttcttttgaaagtagtagagttgtgatgcgaatgcatagcaattactcttgtagatgacctcacaggcttcctcttccaattgtctacgtggctaaaacaaagcaagaaaaccccataagaatctgaaaaagactcatgtaattattaattgacaaataagattatattacattactgataaaccaacaggtagaaaatgaaagcaatgaaatagtatactgcgaaaaaaaatttcatattatattctttgatgaaaaaataaaacaataattgcaaactgcatttcatttttaatgaaacgacaatgtttaattcttctaaaaggtagggagcaaataaaatggttatctggtctttacatcgaatgtgtcatcactactaagtgatattagctggcttattacttaaaattttcttttaggaaaaaagtgtgaaaatagacaggaggagacattaaatggctaaagcaacacccccttgctccgtaagttctttctgagtctgtgtgcctaagattaacaagagagcctgtgagcctcacaaggcaatcacaaagctatgtctacagccttggagagctgtgattacagcagccagcctcctttgcagcacctcagtgatgactacactaactctcactactgagcaacaatgaaatgtttcaaacccaaccaccaacactgttataactcttaaaatttgagccagtcaccatacctgaacgtaaaaagaaaattaccaaaaatgcttgataccaaaaagcaattaatgattcataattgctaatctttattgacagtctcttctagttcttatctacatatattttaattgtctacataatgtaaattaaattttaaattctgatttgtaaacttaatattgcataaatatttatcaatgttgttaaacatcttttaataattattttaacttctttatattatttcattaatttccatctttatgtccttgctggtctgacatttagaaaaaactcctccttttatttagaaaaaaagaatggtgaggccgggcgcggtggctcatacctgtaatcccagcactttgggaggccgaggcaggcagatcacgagatcaggagtttgagaccggcctgaccaacatggtgaaaccctgtctctactaaaaatacaaaaactagcctggcgtggtgctgcatgcctgtagtcccagctacttgggaggctgaggcaggggaatcgcttgaacccgggaggcggaggttgcagtgagccaagatcacgccactgcactccagcctgggtgacagagcaagactctgtctcaaaaatacataaataaggagaataaatggggacaataacaacctattcacagaacagaaataaaaccggagatgtcatgtggaaaaagcttatcttgaaagcgtggtcagagtggaaagaaacagcaacaggagagtcttgatttggtgaaaaaacagaatgcagatggcatagagtatcaacaattaattagcaggccatcaagagacggccataacatattggtaattgttttctttcacccttaattttttctaaaacaaaaacatgaagttagaaagtagttaattttgttagccacatggcttcatggtttaattttatcttctctatgggcctggtacaacaataaagttcttttgagatagaaagacagatgttaggcaaaaacatacaagattttcattctaatcaaaatctttgccaataggctatgacagaatcctatgagagatgatgccatttagaactttcacaagaggcaaaaatagtatgccattggcacctaaaactgccaacagtgatcatcataggatttatttcatttggcggattcttggttgagttcataacctgttccctaggcttttaagattggtccaaacttggcaatggattctttggaaaaattatttcttgatcgttttaaactttcttttccagtgtcaagagagattttcccaggctccgagttttcatttattttttcccctgtcagtttttgaaagagaaatcccctttttgtcggctttgtgattgcttttgtgtcaaattcagcgtaaaagcttttcaaacgtgacagcattagctgttttgtgcttggctgagctaagagtacatgaattcaatagagaagtgaaatcttgtttgagcctggctgatttggctatataatattgaaaactatctgaagcaagaaattcaatacttttcaaattattgaataaacatttctaaggctgcaaaatctctgtgtttttgaaggcattctttaggaaacttgaaacacagacattctataatcacataattaattttaaaagttgaacttattgtatgtagtaactaaggcagctatttgagtgtctcaaattattttactaaaaagggagacatttttcaaatatggaagtagtgccttacatttttagttatctgtggaaggatcgatggcatcatatatctcatccaccataaaaatatgtacggtagtggaaactgaatttttcttttatatattttgtgtattttttggagttgtacaaaattaaatcagcaaattgacccacactagtagtttgaggtttgggtttctggtacaataatgaaaagcattattagaaatcttcttgccaggacctaccatttcttcatgtattttctttattcccttttgttctcccctaaagcttctatgtgattaaagagaaaagatcaataacccaatagtacttttccttctaaagtatgcatgaaactcttaaagttctcaaagcatacaaacagagtgctctctacattgctgatagaacacaggtagtaatgggctagtttccccaggtaactattatattatataaatatttaatgcagagtcaccaagccttgaataactttatgctttgattgtaccatattttctctagtttgcttttcacaatttaacttatcccgtgcttgaaaatataatgtggtaactgtgtaaatctgctcctcaaaaaattttcgaaatcatcttttcttttttcttttctttctttttttcctttttttgagatggagtctcactctgtcacccaggctggagtgcagtggcatgatcttggcttagtgcaacctccacctcctgtgatcaagtgagtctctcagcatcccaagtagatggaactacaggcacattccaccacgcccaactatttctcgtgtttttagtagagacagggtttcactatgttggccaggctggtctcaaactcctgacctcgagtgttccgcccacttcagcctcccaaagtgctgggatacaggcgtgagccaacatgcctggccccacatcgccttttctgaaccctgggaattaaccaaaggctggcaacaatttttgaaatgctgactctcaataaaaatggcaaagtttgaggttttttaagttggcctttcccgtcactttctcccagctccacagtagccttgaaaatcagtagccttgcaaccataatagctgtgaaaactagcagccttttagccaccagagagtgtagaccaggattggaattcttcaaaaaggccaattttattccaagaaccttgccactgtttgacctatcttgcagctccctggaataaacctatatacatggccttgcctttatttggcccgacttagagataactttctaggaaaagccctagctccagggtgttggtccaaaccaattagcagcaattctttaacataacaggttcctaaggctgtgatgctagttgagataaacataggtctggagaaaaacttccagtgaagctctggagaatgaggtgtccataggggattttggcaacctctgacatgttcttgcgggatctagaagcccatgtgcttgtcttaacaaatagagagtatcaataaagagatagaaattgtaaataagaactcagtggaatatctggagttggaaagcacaataactaaaattaaattttcacttgacgtcagattcaagctgcaaaagaaagaatcagcaaacttgaaaataggtaaatgggataatccaatccaaagaaaagaaagaaaaaatattaaggaaatacagaaagcaaaaactgactgaactgaaagaagaattaggtaattcaacaaaaatagttggagacttcaacatctcacttttaataacaggtaaaagaactaggcaaattaacaaggaaatagacacttgaaaaagactataaagactataaacttacaagacctaacagatatctatacagcgtttcatccaataatagcagaatactcattcttttcaactgtacacgaaatattctctagggtaggccatatgctaggtcataaaataagtctcactacattcaaagggattaaaatcatacaatgcagattttatgaccataatggagtacaattaaaaatcagtaacagatgtaaatttgggagttcataaatatgagaaaattatacaacacactcttaaatagccaatgggacaaagaagaaataagaaaatacaaaaatatcttgagataaatggaaataaaaatacaatataccaaaacttatgggaggaggctgaagcagtgcttagagtaaaatgtataactataaatacctatatttaaaaaggaaaaagatctgaaatcagtagcctaagcttctaccttaagaaactagaaaaagaagagaaaagtaaatctacagtaagcagcaggaagtaataacaattagtgtgaaaaaaatcagatagaggaagaaaatataatagaaaaaatcaacaaaaccaaaatctagaaatttagttatttgaaaaggtcaacaaaattgacaaagttttagctgattggttaggaaagaaatggtcaaattactaatattagagaaaaagagggtgcattactaccaacattacagaaataaaaagaagtaaaagaggatattatgaacaactaaacaaatagataacctggatagacctataacaagaaattgaattggtattaaaaacttctcccaatgaaaggctcaggcccagaagtcttcccccgatgaattctaccaaacatataaacaactcttccaaaaaatagaagagaaaggaacacttcctaaccagacaaagatatcacaagaaaacaagctacagagcaatatgccttatgaatatagacttgaaacgcctcaaaaaattatcaaacctaatacaacaacatattaacatgattgctaccataaccaggtaagatttatcacaggaatgtaaggttggtttaacatccaaaatttaatcaatgtattataccatatcaatagaataaaggacaaaaatcgtatggtcatcacaataaatatagaaaattcatgtgacaaagtacaaaaccctttcaagcttgaaaaataaagaacacttaacaaatgaagaatagaaggtattggccaggtgtggtggctcacgcctgtaatcccagcactttgggaggccgaggcagttggatcacgaggtcaggagattgagaccatcctggctaacacggtaaaaccccgtctctgctaaaaatacaaaaaattagctgggcacggtggcgggcgcctgtagtcccagctactcaggaggctgaggcaggagaatggcgcgaaccctggaggcagagtttgcagtgagccgagacagcagcactgcagtccggcctgggcgaaagagcgagactccgtctaaaaaaaaaaaaaaaaagaaggttttgtggattgaatagtgtcccccgctcccaaaagacatactaaaagcctgagcccaggtatctgcaaatgtgaccttatgtagaaatagagtctttgcagatgcagtcaagttaagatggtatttttataagaagaggaaaagaggcatacacagagagaagaatgccacataaaggcactgaccacgggaaaaacaccatgtgatgttacagttagagattaaagtgctacagttgcaagacaagtaaaactaatgattaacggccatcattagaagcaaggaagaggcaaggaaaaattctcccctacaggtttcagcaggagtatgggcctgctggaatcttgattttggatctagcctccagaagtctgagacaatgagttttgtctacccagctacgcaaattgtgacacttaattacagaagcccgaggaaacgaatacagaagaggatttcctcaacctgataaaaggcagctacaaaaattccacagctaatgttattgtgaaacactgaatgctttcccctaagatcaggaaatagtgaaggatgcctggtctcaccacttctattcagtattgtactggaagttcaggccagggaaattaggcaagaaaaataaataaaagacatccagattagaaaggaataagtaaaattatctctacttgcagacaacatgaccttgtaattagaaaattttgaagaatctatgaaaaaatattagaaataataaaataattcagcaaatttgtaggatacaagatcaatatacaaaatgaattattttatacattaaaaatgaataatctaaaagtgaaattaagaaaatatttacaatggcatcaaaaaatgttaaaaacttaggaataaaagagatgcaaggcttgtatactgaagaatacaaagcagtgttgaaagaaattaaagataaaaaaatagaaaaatatcacatgttctcagatcaaaagacttaatattattaagatatcaatatccccccaattgatctacagactctatggaatcattatcaaaatcacaactggcttttttttttttttcagaaattgacaagtggatcctaccatttctattgaaatgcaagggatgtagaatagtcaaaacaaccttgaaaaaagaacaacattggaggagttaactttccaatttcaaaaactactacaaagctacaattattaagtcaatgtggtactagaatgtgaatagacatatagatcaatgaaatagaattgaaagttcaaaagtaaacctttgcatttatggtcaactgatttttgacaagggtaccaagagaattcaatggaaaaagaatagtctttcacaacctggtgctagaataactggatatacacatgaaaaataatgaaatttggccccacctcacaccatacacaaaaattagcttaaatgtatcataaaagaaaacaaataatctgattaaaatgggcaaaacacttaaacatttctcaaaagaagatgtacaaatagctaacgggtttgtgaaaaatgctcaacatcactaatcattggggaaatgcatattacaatcgcagtgagatgtcaccttacacctgttagaatggctgttataaaaagagaagaatgataacaagtgttgatcaaggatatggaaaaaaggtaacacttgtatatcattggtgggaatgtatattagtacaaccattatggagaacagtatggtagctcctcaaaaaactgaaaacagaattaccataggatccagcaatcccacttccgggtatatatccaaaagaatttaaaccagtatgtcaaagagatatcttcactcctgtgtttattgcagcattagtcacaaaagccatgatatggaatcaacctaagtttccatcagtggatgaatggataaagaaaatgtggtacatatacacaatggagtattattcagccttaaataaagaatatccttttgtttatgacagcgtggatgaacctggaggacattatactaaatgaaataagccaggcacagaaagtcaaatactgcgtgatctcacttatgtgtggaatctaaaaaagtcaaactcattgaagtagagagtagaatggtggttaccagaggctgtggatttaggggtggaaaatggggagatgttgatcaaaaggggttaaaaactttagtcaggaggaataagtttttgagactttatgacacaacctggtgaccatagttaataatattatattgtatatttcaaaattgctaaaataacagattttaaatgttcttgctataaaatatgataaatatatgcagtgatagatacgttaaattgctcgatataatcattccacagtgtatacatatatcagaacatacatgtaccccataaatgtatataattatttgtcaaagcaaaataaaattaaaaataaaatgttttaaaacttttgtaaaataaactttataataataatatatttttaatgaatcatagagctaaatatattaataagaactaaaactttaaaactcttctaagaaaatgtaggaatacaatggattatgcagtgttttcttagatatgacaccaaaagcaaaagtaaccgaaaaatacacaatttggactttaacaaaattaaaacttttgtactgcaagcaatattgtaaagaaagggaaaagacaatcctcagaatgggtaaaaatatttgtaaatcatatatttgataagatacttgtatcaagaatatataaaaactcataattcaacaacaaaaaggataaatgacttaattacaagtgaagaaacagtttgaataggcatttctccaaagtagatgtatagatctccataagcacatgaaaagatggttaacatcattgattgtttaaaaaatgcaaatgaaaaccacaaggagatagtactttttacccactaggatggctaatacaaaaaatacagacaataacaagtgttgagaagatgaagaatgcttggaattttcacattactggtggaaatgtaaaatggtgaaacaactttgaaaacagtttggaagttcctggaaatatttttttaatttttaatttttgtgggtacacagtaggtatatatatttatgggatacaggaaatattttgatataggcatacaatgtgtaacagtcacattggggtacctggcctatccctcacctcaagcaattatcttttctgttacaaacgacaatctaataataatcagttatttttaaattcacaataaattttttgactgtagtcatcctcttgtgctatcaaatactagatcttattcattctatcaaactatatttttgtattataaatttcactacccattagccatccccccctttccccctaccactacccttcccagtctcctggaaatattaaacatgaagctaccatatgacaaaaccattctactcccaggtgtatgctgaacagaaataaaaatacatatgtacacagaaaacctttatacagatgttcatagcagcattatttataatagccaaaaagtagaaccaacccaaatgtccatcagctaatgaataaattttaaaatgtcctctacatccaaaaatggaatattatttagcaataaaaagaaatgaaatactgatatgcactgtaacatgagtgaacctcaaaaatatgctaagtgatggaatccagtcacaaaagaccccaaattgtatcaatacattcatataaaacatccagtaaagactgaaggaggaggagaatagacaatagaaagggactgttaattggtatgggtttcattgggggcaaataaaatgttctcaaattagatcataataatggttgcacaaccctgaatacattaagaaccagaaaattatgcactttaagtgggagaattttatggtatgttaaaaagtatatctgcatgtcattgactacagatcttttcttattttttcaagttttatgaacacagttttagaaacatagtctccatttttctctttcatgaagctgcttgccagctatagaaatgaaaaaatagccatgtctgtggaacataactgctacctagatgggagcctccatcacacaatggatagggagctattttcttttatggtcaagataggcaggttctgtcctatagaatatattctgagatgttacctgtagttcagaaaaacagggatattgttgttctaaacatttcctcaacatttatgtggcttcctatttattaataagagaacctgttctttatgtgtcattatactagtttattctagccctggtcctggtccaggactgtctggaggtattagaattgccctactctatgtgaaataaggtcatatctgaataggtatgtcagtcagcataggctaagctacagtaataagcaacctcaaatctagaggcttaatagtctatattttactcatgttacatgttcgttgtagactgatgagagcattctacttagcttagtcactcggggaccatggctgatggtatctccatcttggtacattctttcatgatcatagaggcaaggaacatggttcttgagccttctgcctggaagtgaccagtagacaaaaccagtcacatggccattcctgagttcaatgggaatgccgatgtataatcttctggcgtgaaaaggcactggatatttgagaacaataatgcagtctaccacaatatgctcatggggtctgaaaaggagctgaaaaaacgccattttctggggttctgtcctctggcattgtttctggaatcgtttccacccatccatttctacaccctctcaactgacttttctcagatgcctggggtagctgggtgatttgttaattacagtattgcttaagccttttaataaagtcagcaaattaaagagagagcccagataaagagaatgctttcaaaaatgtcataatgaaattaaggtaacgaagcacttggagacctctcctcccttctttttgtatgaaacttattccaaagcagctggaagagaaatggggcctgaaagtaaagaggggaaaaatatattgtatgccattagtttaattataaaaattcattacatgaagccatgtaagacagaaaataatggaactctaatgggttggccgataacacatttactagtctgctctcagcttgtagtcattgttgaaaggacagaaaagtaacgacgttggtatgtagtcttcaaagctattgtaaagattaatcattttcagtaagccggaaaatgagggccattttcttaaatagtatgccctgtatagagtgttaccttctgaaacagagttgtttggtaatgtcagaggtttaatagatgagtcttgaagttaatggtgagaggctttacttttgaaatggctttcttacagctattttaacatttctattataaatccataaagaggttttataggtcgttttaattcacacaaggagggaagaaattgtgcttctcttttcccaataaggatttatagaacattaattcattcttgggaccaaattgtttagtgattttcaaaaataaactatgtatttttctgctgtctttttttcagaaatgccttactttattatacataataattttccagtcatgctataatcatcaagattgttttatattcttcaaagctcagttaaaataaacccagtccttttccttaaatttctttatatggatgcataacttctttaactgaattgaaatgaaacctgaattgagagtccagaaacctgcatttttatgatgactctttcactgactagctatgtcaccttgaacaagtcacttaacctttcagagcatttatattctcatgtggacaattatggaattgctcaaaaaggaagaagatatcaaaagatgaaagtgaatatgtaggtaggggtcatatattcgagggccttgtaatccaaagagagaggttaggactttgtcttgcaggtaatagcaaaccattgaaaggttttacacagaggagaaatgaggttctatttgcattacaaaaagatcatttacgcagttgtatgtaggtggaagggtggtttgagagtggagggagggagccaataaaaaagattattttagtacctgagcaagagatgatagggacgtaaattaaggtagtgtcaatggaagtagaagatttggataaaagttaaaaaaaaaaaaaaaaaaacttatgatacaactacccagggagtatgttccctgcctcctgctccagttgaggaccaacatatcagattgatccagagacagaattttggagaacattaatatttaaaggacaggcaaaaaaaaaaaaaaaaaagcttgaacactcagagaatacagaggcgaccaaaagagtggaagccaagaaagcagagaacttcgagaagagaatagtcagcagcaccagttgctgcaaataaatcaagtaaataagaacttaaatctttccataggcattggcttttggtaactgaatcagttaactattttcacaaatgtgagtggcatatagcaataagcccatattgcctttcatgaattttcagcttgggtggggtggcacttcttcatgttgcaggttgattggggtcgctctgctccatatgtcactcattctcctcctgagatgagtaggctagtccagagcatgtttgtcttaaggtaatggtgaagtgcaaaagggatagccacactgcataaatacatttcaagcctctgcttgtgttacttctagtaatatcccactgggattaggcaaagcaaggcgcatgaccaagctcaatgtcaagggcatgctgtctttcgtaggaagaatttcagagttacttagcaaagggcatggatacagggagaggtaaagaattggggccagtaattcaatttgccatagtgacttctgtcagaatagttttagtggaacgatgatggcagaagcctgattttcatgaattggagagtggcacgaatgtagtcaagttgagataatgagtgaatatctgccttctaaagagtgtgactgtgaaaggaaagaaaatgatagagtgcagattattgttgttgttgttgtttaaagatgagagagacactcatgtttgaagtctctagagaaggtccccgcagagaggcaagaagttggaacacacaaagagagagggagtatgtggaggaggatcccagaatagatgggtgcccagatggtgaaatcaacttccaatagcagaaaagtcgcctcttcctctgagactagagagaaggatgcaagatgtaaagtctgatatttcatgaaatgtatgtttgatatattaaatttccccctgtggaattgtaggtaggatcatttactgtgagatttctttcagttcgtgttgtcaggaattagtctgtaaaccacattcgatatttcaaacagaggaaattcaatacagaggactggctcctccataggaatgaaggagctgacaaacccaacagaggacagtgaggcaacccagagtttagcaacttcaggaaactattaccacctcaagggctggggaaccgacaagttttaccaaagcccagaaaccagaaccatcgggtgctaattcacccaatgtaaggtctgcacagcaggtaatggaattacagagggagcagccgtccagtgggaaacggagacaaaggagatactgccaagacagagagagaagggggataattatcttgtttcaccctttctcatgctcttctgtctcccactagtgtgtctcatgacttaacctagttagaagccagctagcaagaaatcccaggaaattctgacctcctatgggagttagtacatctcaatactgagtggagtaggaaatgggtagagaatggatctaagagcaaacgacctcttggtggttagctaacagagttaaatttttccatgaatcccttggttcatgaatgtaaatacaggatccaaggaaaaataacaaatccaacatgtagaactttttgttcataagcatattaggatcctgttttacaattttccgagcaattgcttgattttgacacttcaggacaagccggaggcatggtcagagcaagtaaccccatcctagtttacagatgacaaaactgggacttacaaggttaatgacttccttaagatcaaactgcagaacaatggacaagcaaaacttcctgggaagatgtcctttcgttactctgcactgcctttcttgaagttcctttgagacacagtcattaaaaatttaagtaatagttcacccggaacaaacatttattttacttgtaggtgaatatcacaaaacacattttaaaaggaaatttaaccaatattcaaccttaaaattttaatgatagagctatgcacttgcttttatcttccaagttaaagggagaattttagagttgcagcatttctagacaatgtccataaaacagcgagctacttgctttgcattcagaaggggctcacactgtggggaatatagtttgactcattaaaattagtagtagatgtgctagcagtagtaatgatgatgatgatgctgatgctgatgatgattaatatttatttaatccttcgggcacgccaggcacctttgtaaatgttctccctgaattctctaagttaacccacctaatcatatttccacataaatactgttaatattcccatttagcaaaggaggaaactgaggcacagaaaagataattaactctcccatttgccactaagcgatcacgccaggattcaaacccagcaggctcattgtattgctcaggcttttagctactctttctcttcctcctctcttttctaccatgtagggtcaatatcactaaaataagttcttacacataaaagaaatgagagaagacaaacaattaaagtagaaaaaaatactcaaaattcttgaaattaattcaggttgtctcatagtccacaatcactttttctacctaagatactgtgaatatatatcaagcacatagtgcagtagcagcataatgggtttgaatgtgaaacatttctttcctggttggggaaacaatcttttggggatttagcattttatattcttcatagaaaacacacacacatacacacacacacacatacacacacacacatatacaaaggcaatctttttttataagctagtgctcacagtattttaaatttcttcacacaccatgatcaccacacaagcaattccctgtggtgtacaccattgtcaatggaattcagaaagagaaaagggtgtgtgtgaagtctgttgtatttttgaatttacactccttctgaggtctggagttatcccagtagtaaatttcacagcagtaggcaaagctggtcaaggtcatggttcctagtgtgaatgacacttgggtaaaacccaaggtgggcgggcagaatattaccgtaggagaaagggaaaacattctgtgtggggaatgtctttaagaagggagaaaaaaaaaaaaggctacctttgagaacctttgtgtttatataagggcctgagccccctcaatgtcagtcaaggtcagtgggagttttactttttaatcctacatcctcacaaaacctgggcagtattcagtgagggttagcactcagtcaagatttccttaggtataacagtcctaactttcgctgtgaatacaattttgcagaaaaatatatggcacgcgtatttctacctttcaagcattaaagtacatcaaaaagttctggtttgacgtcaagcctcactctttactaccttgtttagtaggaaatctgtcatttaactctagcttactatttctttcagagattttggaaaattctaggatatgttataatttataattttaggcatttttatgatctattgattatgtttttagattcattggcaccttctgcattttatgttttttaattttaacagctttattgaagtgtaattgatatacaaaaactgcataaaattatatgggctagaacatgtgcatatacccatgaaaccatccaaatggtataacctcttatatctagacttttcaaacaggaacctatgagtgatgggtggcttccaaggttatttaacttgcttgagtaaaataaatgattttaattatatatttactaaaaattttgtttttattttgtattcctgagcttttacatatatgctctgatactggtccatcataagtattttattaacaattcagtgttttataaaaggaattcatttgaaaaaaaggtaaccaagttattggtctcagttttgtggatgttcatgctattaattagcaatttaatagatgagagataataagctcttcttttaaaatgcaaatagcaccctctggatactaagggccaattacatgttctttcgtatcttggaatacatttcttttatcactttaggtttggcttaagtgaggaggagaaagaaagaagtggtaattttgtaccctaggatatttctagaaaaggcaagcctttggcagaagttccctcagaagggctttcaaatagtgcgaggatctgaaaagtggagaatagaaactgtaatgcttgataaaaggagtatggaagaaaaggcaggcattccacgcggataaatgttaattgttttgtaatagcagcaactatgctctgtgcctttagacactgtcctctgctttcatagcaaaagtcagtgatattggcattagcttcttgataatagtttggtaatctgggtctatttgctatatgcagtaaatactattacttggtttgattctaggatgttttagttaactgagaaattacattatatatagattgtatatgttcaataggagttcaccaaacacgctgaaattatgctaagaacactgtttgatttttattctgtaaatatcatactaacgcaaaagaacaaatattaaaacaaaaatgatttttctcctcagaagcattattttcaatttcttccatttcgtgttcagctcatgattatgtattcttagagataaacacagtgtagttaaaaattgtgttctgttttttacacaagaaaattgtgctctttttacagtgattactgtgcacatttgctacatattggaccattggaatgatgtattatgttcttttaatgtccctgcattaaacatcgacattgtttctctttttttttttttttttttttttttttttccgagatggagtctcactctgtcgcccaggctggagtgcagtggcgtgatcttggctcactgcaacttccatctcctgggttcaagcaattctctgcctcagcctcccgagtagctgggattacaggagcctaccagcacacccggctaatttttatatttttagtagagacggtgtttcaccatcttggccagactggtcttgaactcctgacctcgtgatccacccgccttggcctccctaagtgctgggattacaggcatgagccaccgcacccggcctgtttctcatttttttactgctttggttaatgaagattttaagtcatatagtatattgatcttcttttgaagattttatcaggataaagtaccaaaagtgagattattgagtcaatgggaataagcatttgtatgtcacttggtatctattgccaaattgtcctaatagataacggtccccagcagtaatacgtgaatgtgctagttttactggtcttttcagctttggattttattttttgttaatttaattggtgtccaattgtaccttttcaatttaatactctattttttattacttgaaagttaacttttttctttttaaataaaatcatcccactctttctcttgtttgaactacctgttcctattcctgtgtccatttatcaatgacttaacccatcctattgaatttgatataactatcttaacaattagtattatcttaatgcttagaagcctcctctctgcacttgcagaaatgtttaatagaaatttcaggttgatatgcttcgagataaaacctaccattaattgacttctttctttgaaatatgtttcaagtgatgagatagcaagtttgaaaacactgaattgccaaagacaaacaacgaagaaaatgtaggtgatttggtttagtaagattcttatattttgactttttttctaattttaaagtaaggtattctaaaagtattttgatccttcaaaaaattcgtgactagaataacagtactattcttttgttgttcaatattttctgtatgcaggtttagttgaacgccagtagatggcactaattacataaacaattcaacaagttaatgaagagggaaagaaatgtatgaggtttttttcgttcaaatgttgttatatgtcacatattcaacaattatatatgagcttatttttgtagtttttttctcttgtgataaaaacaattaagcccactttattgccaattaattgctactaagttgaaatacttgatactggttattgctcaagatgctgcatttgaaaagtttgtcctgaaaggtgggttaccttatactgtcatgattgactaaatcatatggtaggttaaaagcaatctaatatatgtattctgacctgaggattcagaagctgtttacgaagtattttaagacactccaactagagatttcataaaaaaaactgacattcattctctttctcataaaaatctatagcagttggccaaagacctccgccagtggcagacaaatgtagatgtggcaaatgacttggccctgaaacttctccgggattattctgcagatgataccagaaaagtccacatgataacagagaatatcaatgcctcttggagaagcattcataaaaggtatgaattacattatttctaaaactactgttggctgtaataatggggtggtgaaactggatggaccatgaggatttgtttttccaatccagctaaactggagcttgggagggttcaagacgataaataccaactaaactcacggacttggctcagacttctattttaaaaacgaggaacataagatctcatttgcccgctgtcacaaaagtagtgacataaccaagagattaaacaaaaagcaaaatactgatttatagctagaagagccatttatcagtctactttgataactctatccaaaggaatatctttctatctcatcatggcgcacactgccttacctgttatctgataaataagtcactttgggattcatgatagagttatagctgtacatggtctcatcctagtatctcactccacacacccaatgggaaaatttgtggagggcaatatgactcgtcacttcatttcccattatatatgaatggaaattaacagcgcttatagacagtatctcctcaaactaagccttgtatccttattatacctctcttgatctctagtgcttttttcactagcatttattccaatcataaataaaaatataaattatgtaactaattgttaaatatttgtcctttaaattaatctaaatgccatgagggcagagattttgtctttctcatttgatacatccccaggtcctgaaccacgtgatataatagggagctagtaaatgttttttgaatgatgactccctttgcagaatgtacaattaccttgtgcaagctgaaaaaatagcacctgtacaatatgaggaagaccacggtgaaaaataattgagttccaaaatatgacatcaattactgaaaaaataagctcggtgatttttaacaagaagtaaaagtcaccactggggccaaaacagattttgaactaagagtaggaagtcttaggagaaatgagataatgatatatggaaattaagcggccaactaaattttgaaactgagctagacattagagagtaaaaactcctgtgaagctgaatttaagctggtcaccctggggaatagagcaactctaatcctgaattccagacagtaggtgtatagatggaaaagaccatggaaaagaagattcaacctaaagttgggaagttttaattggagccctatgaaaaagaccctggtggagaaagggcaaacttgaatatggagctgatatttggaaaaattctcatagtaactactttttctcaatggcaaggcttggactttcttctcaaaatacagatcttatatgtgttcaattaaacagggacagattaggttcaggaagaattattcacatggaatcaattggtatcagagagtcaaccattagatcttagtgggaaatatctgcttctcaaagagaagtcttttggggaaagcaaattaaagtcagagattaatttgatgagtttaggtaatataaactaaggggccaagaaaaaagcttgctcatggtatgaaactagagcttgaggacactgatctagtctatctatactactctttctgacagacccctctcttcattctcatgctccttgatggcccaagccactctctcagttttttaaaaaattgttttatcaaggtctctggattcttcatgggaatgacttccagtttatattttttggcttggttccaaaaagctatcagctaaggaatgcatatacttacttcccctatgggtaaagtaaatgagaattttagaagccaactcacatttttagcctgtacagaatctgcaattcaccaagctacttctgactcatgtctataaagttcttccctgttcttttctcacttcacatgtactctttgcaagaattcatccacttgtgtagtttcagtctgttgatgactacccatctataattccagctgagaatgatcttttgagttttagacatgtagatcctgctgctttctttcgatgttaatgtcccacaggaacttcacattgaagaggtccaaagctaaactcatctttgccttcttccaatctctttctccaaatgcaacctacttctgttgtccttgtcttagtccttttcgtgcttccgtaacaaaataccacagactgggtaatttataatgaacagggatttgttggctcatagttctggaggctgcgaagtccaagatcaaggggctggaatctggtaagggccttcttgttgtgtcatgattccatgatggaaggtggaagaccaaaagagagaaaaaatggggccaaacttgtccttatatgaaactcactcccacaataatgatgctaatccgttcatgaaggcagagccttcatgtcctaatcacctcttcaaggtcacatttactactgttgcaatggcaattaaattttaccataagtttgggaagggaaaaacattaaaccatagcattctgcccccttttccccaaaattcttgttcttctcaaagacaaaatacattcatttcatccccaaagccccaaaaatcttatttcagcataaactcaaaagtgcaatctaatataaattagatatgggtgagactcaaggcacaattcatcgtgaggcaaattcccttccatctctgagcctgcaaaatcgaatcaagttcatcccctcaccccctacccttcccagcatcaggtaaccaccaatcacagaaagttttactgatagtcctgctctagatcatctttgtctatgttcactttagctatttatcctagtgttccattattggaatactaagcatgtgggaattatttatattctactgttcaaggtcctcaccaaggtctgattgcaaaaattcaaaaaattgcaaccttaggcataaatgggttaagcagtttagggtacatttataataattatttactgtgctacttcaaaaatcttattgcctctatttataaataaaaagtgttgtctctacacagtggcttgttgtaatgcatttacttgtttctgcctgattttttctatttatacattttcttttttatttttatttttattttttcacttttaagttcaggggtacatgtgcaggtttgttacataggtaaacttgtgtcatgggggtctgttgtacagattatttcatcacctaggtattaatcctggtacccgttagttgactttcctgatcctctcgctcctcccaccctccacactctaatagtccctagcatgtgttgttcccctctacgtgtccatgtgttctcatcatttagctcccacttataaatgagaacatggggtatttggttttttgttcctgtattagtttgataaggacaatggcctccagatccatctatgtccctgcaaaggacatgatctcattctttttttatggctacgtagtattccatggtatttgtgttggtctcaaaaactacaactatgacaggatggcattttcacttttgttgttatattaaactcatcttaaaaaggaaagattaataatgtcaatatttgggttatggagaaaaagtatctcatatctttgaaaaagttctgtaactatagctttttaggtaggagggattctgtggaaagttttctgattacatcatttctcacagttcaggttagacaccattttactatgaaacactaatgcattgcctgcactgagactttcagtcacatggagaaacctaggcaaaatttttgtacacttggaagaatatttaaattagtaataaaatctttagttttaaactgttgaatgttaaataagatataaaatgtacttgaaagaaatttgctttgatatcagacactgccatgttgcagtttcaagacataataaaaaagtaaactaatgtttatattttgctgtttaagtttattaatacatcagatgagtcttcaaattctacagtggcttttgatatgatcatttttacttgccattttatatagaataaatataaataggcatttatgcttaaaaggaactaatctatctatggaaaaaagagaaggctgcttctcaactaaattgtacagtttagaaacccagatctgaacatagattattgttgtgacctatgtaggaaaatatgttgttttccttatcgtagtccttacagagtccatgataacatataaagccagaaatgtgagcctctgcaagttcatttctttgtcttcaatctctgtgaatagatatgagtttgtgaataagataatattagatgtgatattacaaattattgtgagaagcctctaaggattagatttcaaggactgccatctggctgatgactttatgatgacactgtcatgagatttcatttccttatttctgttccaggatcactctttaaacaagaaataagcattaactctgaattgtctgcttgtagctgtatgagggcttccacaactgccaactagccaggtacaaactcatcaagcagaggagatggtccttgcatcagagggttaaacatgcctagaagttccttagctaagctcccagatactaaaaaatccctctaggttctaagaaagattcagcatgtacatgtgtgtacatgtatgtgtgtacatatatacatatacgtgtatatgcatatgcatgcatatacatacaaacacattttcttccataacatctcagtattctctgttctttataatactgttttgtattttaatgatcaaaattaatagttgatcatctgaaaacattttgacctgttttctccgtctttgacaaccttgaaggcacttgtaagtcactctttgcttctctattcctaggtcctttctcatcttcattgcaacaagaaaagagaaaacaattgagccctattttgtgtgtagcaaggagctactctagttaaacactagatctcttttacattctccaacatgttgttttagtaattattctactttcctttttttgggatattcaatttcttctttctttttgctcctcccctttagcaggccaacatactcaagtctccctcatcctaagagaacttttttagtatatcattttttttctatccagctgtacttgcttctgcttactatatcatttttaagcagtagttggcattactgtttcctgttctttagctactagttgtactttgacccactccagtctcacttccccagcaccaccactttatgaaaacaaggacttactaagatcatcagtgactttgtaatagctaattagtgtattttaattcgtccatcttcttgactatattttaacattgatcctgttggtcaactctgctaatcaaaactttatcctccttggttcccagaacaatattatcttgaatatctcatttctctaatcatataataattgtgaggtgcttggcacaatgcctagtgcgtagtaagaactcagtaaaatatcatctgccatcgacaccataaaaattaatttacttactcaacaaatacttttgtatgaagtttgtgctaggtaggcccagtaattggtacttggtatagagcaatgaaaagccctaccctcataaagcttatattcttggaagcagaagttggaagacagacattgacaaataaaaattaaatacatgatgtgtcagatggtcatacacacagtgtggaagaacaaagaggaaaacaagtggagagagagagggaggtggaagaggagtgctgccatgaaaatgtggtaatcaaaaaaggtcttactgaaaaggtggcatttaagcaaattctaaaagacctgaggatgtgggccatatgtataattgggggggaaaaagtagtccaggagagtcctaataagttaaaatgccccaaagcaggaatattcttggcatgttgaaggaaccttaaaagggagatcagttaggcagaaaaggatcaagcgagcaggaaggtagttgacaataaatttagaggggtaactggcatctgattatattggccttttaggcctgtggactttagcttttaatctgaatgagatgggagttattggagggttttgaatggaggagtgacatgttttgtcttatctggctcctctgttacaatagactaaacagaagtagtgagaccattaggaaactgttgtcataattcagtcaagagatgactgtggctgggatcagaatgggagaggtgaatgtggtgaggagtggttggattctactatattttgggtacagagcacaacagattttataatggaataaatttaggtgtgagagaaagagtcaagaagactcaagaatttttagcctgagcaacggaaagatggggtcatcatttactgagatggggaaggctccaggagtaacatattttgggaggaagatgtggatatgttacatttgaaatgcctattatacatctaggagatgtgtggagtagatagctggatatatgaatcttaagttatggggagtagctcaagatacaaagttgggagttgtaacaatgatcagtgcaagttctctgtcttcaatgcaattttaaatgttgatgttccattcttaattgtctctcttctttctctctgcacattttgagtagctttgtctgttggcttcagttaacattaagactcctcagtgtcaacttccatcttacactcttctcctgatctccagaactgtactttctgccacctaacctacattaccacctggatatgctacaggctgcaaaatgtgtcaagtagaatgcattatcttgcccctaaaagaaagttaaattttctgtgttttcagtgtagtgtaattgtctaacttaattgtctctaaaactggaaacctaagaattaccttctacctttctcttgatctctctttcccaatctactgacacatgtattaaactggcttccaaattctgtgaattctacttcaaaaattgctctagaaacaattccctctctttatccctattgtcacctcatcctaaagcctcttcatcctttgtagatttctgggagattgtaaccaacttttctctattctgccagttatcaagtctttacgctcatttgacattcacaacagccttggatctgtcttccttgaaatgaatcttcttgcttccctttgattccagtgctttttttttaccctcctgagacttgatgcatgatatttacatgtatgacatgtttccaaaagcattctcaaatttttctgaaagtaaaaacaaatgaaaaagtaaaacattttcctgggaagaaaagcaaatagtgttatacatttttgcttgttcatttgtttgtttatttaggagagggacaagcattagaacttcataagagtcttatatgctgtatctacaaataccgtcccttggcaatataattttagagttccttttctggaactacttaaggactgttttatgatcctcagcagactgttatattattttatagccataccttttatttgctgagtaattgtactcaataattgtttgtaattgaatgaaacaattcatcagatgttgggcactgaatggctttggattatttccaaaaatttaaaggataaagatttgctgccttcaaagctatgtacaaaaatatgatagaatgctagcgggatatttgtttaaaatacaacctttattacattggggcctgctcataatatatatgtggcacattttatttaaaatattaaagttcctggtgggacatgtccccataatcccagcactttgggaggccgaggtgggggtgggaggatcactagaggccaagagtttgagaccagcctgggcaacatagtgagataccatttctacaaaacataaaaaaaaaaaaaaaaaagccaagtttgtagtcccagctacttgggaagctgaggcaagaggatttcttgaacctaggagttcagttcaaggctgcagtgagctatgatcatgccagtgtactccagcctgggtgacgtagtgagactccatctcttaaaattaaattaaatttaaagctacaaatgaccccaaagccaccagttcaaccctctcaattttgaataccctattttaaattcctcttatgcgaaatgtaccttgtagtccattttaaggactgagaggatttggtatgttaaaaaattcaatccattatcaactcctttaggtacacttagcagtatgaaaatgtgtctttcggctcttcaggagagagtcatatgtatagttacaagacaatcccatttttatattgctgagacccaaatcttcccaactgattatgaagcataagaactcttcggaggtttaagtgagctgagattgtgccactgcactacagcctgggcgacagagcaagactttgtctcaaaaaaaaaaaaaaattctctgcattctacagtagggtaatataacatctatgatgtgaaatcttggggctccgggccagagagtgtcatgatccatatggatctaaaaggttcatagtggtaacagcctgcttcattttatgtcatctcctttcaagtaattagaatgtttctagcttgcagggattgcacacaaagggagacatttggaaccatgtcattggtgatttactggtgtggaaaattacctggtgatgtagccaagtagccattttcattctaacccagtcctacagtcctgaactgggctgaaccaacgcaccaaaatatatgcttagaaatgctcctatgtatcagttttcccaggaaaaacaatagtattatcgaaaacttaccattgtttcctaataaaaaattataggataccaacagactgttttttgttcataaatttaatattacagtatcaaatattaaagcaaatgggagaaagtttttcttatttggtttaattgaaccattaatgttagctacaatacccatcatgttacttttcaattatatttatattttcattttatttctatctgtatcattctcagaaagacttctttaaaacattcaataaaaatagaatttaggtagatttatttttagaaagttgagtttttttaataaatgaatataatcatcacttgacttaatttttttctgcacaattctagaaatcttatagttttgggatcctttggctttattcagtatgtaacagggatctgtttcctttctctaaatcattaattcaaatgatttcttatattaaaaatgtttggacatataggtattaatgagttttatgaaatctaatctttccaatttccccctaaaaagggatgtcatttaatcagttctaggttgtgatcaatagcagatttttttttttttttttttttttttttttttttttttttttttttttgcagctccctttcaccccgtagggaaacctgatatcatccttgactaattgcagcaaagagcctggctcaggtcctttgtcttataccgagtgtttatagattcttgagcccagcagaatctgaactcctggctactgctacctacttcccagcccaggccccaaaagccctatgtctgcagccccgtgcaccactgtgtgtttttgtggcatttctgaaacacagagctacttaacttgtttctaagcccagattgtgcctttttgattttctattttggtattttatctaccatttttctgtgtttggatgtttcttctatattttgaaataacttctttcctttagtacaagtgattcttattgtagaaactatcaaaaatttacaaataaagaatcattctcaacattcttagcaattccttctatcatatttttgcaaatatatttttgcctatttttattttacttactccctgtttattaacagttaaaagcattttcagatagttttattttttcatttaaaaaaatcttaccacatttttattaggaaggaaatggacaggtgtttatcttttcaataaaaaacatgggggaaataatttcttgaagtacatagtgacattcttccagccaatgttttatgctgtggtcattccgtctgtcatcagtattcatagaaagagatgaaaattatttaaattaactaggaaatcaattccccattcaaagcagtagttgtgtgtttcaaatatcttctaatagtcagtttcacacttagctttatcaaattcctaattatgatactcattacatcactctgtgtccagtcagtgtgtttatgccacagagcaattaaagcaaatcaggtgaaccaaattcaatcacctttgtagataataacctacgttgcttaaacttatggccgctcatacaattactgatggattgcctttttcttttatattgccagtattttaaatgtcctagtgaagttggggtagctgttgaacttcaactttatcacaacctcttttttaaaatgtgtaaacgaaaaaaccctccatgaaatgaccaaatacagttttcatgctgggacaaattagatgaataataatcataaattcataatgattatttatgattttatgtttttatagtgagatatgttttgttgaaatgtgttatataagtgatacttaagtttcctattaaaatagaaatgctaaaatggcattgttctctttagctgtgagtctagcttttgacctctgcttaaacggaactgttgttccatcccaaatctgcaactctgaggcctatgctcccttcactgctgtctaatggatacctatcaatttggaaggaggtttcaggcagctattcccggtaatctaatctcagctctgtccttttcaatattttcatcagtggcttggatgaagacatagataacattcttatcaaatcaatgccacaaagcagggagaaatagcaaatatagcagacaagagtatcaggagccaaaaagttttcaacaagttggactggtaggctgaatactgaaagatgtaatgtaaatgcaaggtgctacatgtgggttcaaaagaaacatgaaacaaaaaacccatctaacttagactgggctccctggaaatagactaagatagagagttgtgtgcataaggtttgttgaggagtgttcccatgagatacatgtgtaaggttgtaagataggcaagattgcacagacgaagaagtgcagtgaagcctgcagtgcgttgcggcctcatcagattttcaggggagttctggaaattgcatggccctttagagacacgctgaattgaagcaagggatctggacctttgaacccaatactagagagttaatggtcctgggtcaccccatgggaaagagcagactggagtaagattgttacctacagctgaaggcaatttccagggagggaggcagctgtgagctgttagtagtcaatattccaaccagctagggcatgaggtcttggcagagcaacagtgtacccaagaccgcagtgttacccaaagtatggtcctctgactggcagcattggtatcacctatgagctcactagaaatttaaatttgtaggtcctaccccatccaactaaatcagaatctctggggatgggacttggggaacttttaacaagctttcaggcctccaagttatttctatgcatattaaaatttgagaaccactgcctacaccaaccaaaaacattccaaatatggagataacatagagtttttagcaacaataatctccttctgtttcacttctctctttacacacacacacacacacacacacacacaacacacaacacacaatgtgatagaacagtgggaaaggaaagccaaaggggatcttaggccgaataaatttaagcatataacctagtcctaagaacgtatatttcagcttaatagagagaggaatattgttataaagctgtccaaagatggaacaggctgccttgtaaagttgtagaagtattcaggaacaggttggtgataccttggtggttgtatggtataacatcctgatcttcacatactcatcatctagagtgggagttttctttttccaaatggggttttggcagaactagttccactgtatcttaataagtaataactcaagaaagggttctatggatgaaaaaatgattaggtaatatcaagttaaatcaaagcgaacagacttctttcccataggagtaatcagacccttattacagtgcatgcttggtgaatcaacaaagtatgtgtatttatgaaagtatggggggaagggataatctatacagtatgcatcccttctaaaagtttgaccatgaaaacaatttctcaagaatcttatacaacactacagtatctggtccaatactatgcatagaacatgcactcagtaagtgtttgtaagatagatagcatagcatataggccaggccactgaagggaaatcatctcaccgtgagttacctgaatagtattctctagtgccattagctcaattcttcacgtaggcataagcctatacatttgccatgctaaccaagggaatttgtgttacgtgaattttgactctattcagacatttttttctatgactcctccaaggctgttattcttacctcatattctggtagaagtttaaggacttttttctgggaatattgattaattagctagctagctagagacagagagaggatagagattgattctctggcagagcctatttgaatcatattgaatctttttttttcctgagacttcccacaaggaggatggaggagaaattttttagaaatccaccgaagtaatcagggatatcttcagtaaaagaagctatacttaataaagtctctattttagcagatggcaatcaacaatagaggcaatagacaatagagtctattaaaattgctgggatctgctaataacgtttttcttttccctgaaacaaatgccattaaccctccttgacactctgtcttcatcaacattctaatagaatggaagtaactcataattttgaggatttttttcccacacaaaacctataaaccacaccacgctagtgattacttttagcctagttgctaggttgctgctggtaacagtaaaacttatcctgacaggtaggcaattccagaagcccagccaagcacttggtgtgtgtgagtaaacccccatacacttctcatgtagagtaaccctggccaacccataactcttagcaactattcctggtggacggacctggtctactctaagaagaggccaaggttctttaatagtgcagttgcaagaaccagaattgaaagtcaaagttctagcaagattttgcagactccttggcaaaccagtggcttgggactcattcttgacttcaagcccttaattgataatggtaggacagcttgcttgcgctgggttctgctccctgggatatgcactgtttgccaaatgagtagcaggtggacagacatctttacaatttgctgtcccatattctaaatgaacgtgacattctataggtctgagttaacctatgaagtcaccaatttcaatatcaaaatatttatgacagagaaaaggatactgaggcacagagagtctgtgactttcctaagctcaaaacaccagtttgtgttaattctgacacagaaattcttgtatttgctatcagtctcctttttctgtgtgtgtgtgtgtttttacattgcagcatcacctatatgatgttaggttctgtaactttttgagaattttctcacatacagtgatgtgttactttttgatatttcaaatagttctagtaagtcttttctacttttattagcgtattaacatactggctctaagagggcatctcaccacatctttgccattcttcctggaaaggcaagtttctctccatcttcttttttgtattccaaagttttgccaaagtttgcttttgaaaatgggttacctggcagagctttattattctaactttgaaagtacaagtcagaatcagacagtggcagttatatatgcactactgtgattactatataatgaaagtatctatggtgaaaatactgatactgacatatatttgccattttctaattaagtgcttcagtaaaaattaagcactcactctttgccagatactgcaatagatattgagcacattgaacaaaattctccatatacatatatatgagtccacattctatgaaagtataatgtttttctgagaaaaggcataatattctattaatatcagcttttgcttcttccaccatatattgaaagaattctgaatactgttataatttaatgggagaatctagagaattctgtatttgctttcactgcattgatgaactaagatttttaaaaaatgtattcttcatagaactacttttccatatttacctaatattattcttatatcatttgagcacatatttcactaacaaaacaaatgtgcaatgttattagttctaacatcaaaattacactgatactttaatttttatcctattatttttcatgcagattaaaataattatagctacatcacatgttgcaagttttaagagctactttaaaaatatatgcttcaggaaagacatgattagatggggaaatggatgatgttcatattttcaaatgaaaagttttaaaaaagtgcctatcacaaacactaaatttttacataaattatcaactactaatatatctacaagaaataccatttttccctacaaaaactcttaacaataattgttaaacttagtcctggaacctgctaatataatcggacaaatgttgtcaataagaaggtgaaaaagaaagcatatatagtttatcaaactataaaatatagtttatcaaaaccaatttttcctattgacatttattcaggaaggaaaatggatgagtgaaatgaacaatggtctctaagagaggtgggagatagcaataaattcagaccacgtttcctgtcattacagcagggaagtaaaagagctacagtcaactctcgaaagtacttgggggaactaatgattccctgtagacctgtgatgtttttgaaatttaattcaacaatttgatatacaccgcaaagcgaacagatagtcagatcaaaatcggaagaacgattgtctgaatggcatccatttttcctagatgtgctgtcccatcctgtgtcaattaaactttcaggtgatcttcaaacatatttccaagtaaaaggtattgcagttatcctataaactggcctcttccccagcactgcttttgctgtggtcaactttatttctttgggctcacaaaactgatagagcaaaataaggaaaacggaacattggattaaaataaattaattcccattctgtgactcactaaaaaaaaaatgataactatgcttctgtgagcattaataaggaaatgaataaggaaatgaccaaattgttcagtggacaacttgtatgggatttttaagtattgtgtcatcatcaatgttgtcaattagcatatactttgaaatcaactaaagcaaatcagttgactaatcattaagggtctttttaaatgacaacatctaaacagcaaatgttttattttggaaaatcatgacagcacaagaatgagccagatgttttacaacatgatatccataatttaaagtatgtagtagtcactcaaaggatttctatttcagtttccttatgatttggctaagctagaatttggaaaaacactttaaggtaatgtgagaaacagcaaaattcaacatgtggattttttcactaaagcttatttctgattattttttacaaactttactaggtatatgttaacttcatgacacttatagcagtggaccgtagttttaataaaatgtgaatgtatactcttttctcaataatattaaagaatgttgactttcgtgaggatatttttatttttctcaacattaagaactgtcaaagatttaattctacaacagaagacgtgaattttgttttctaaaggagaacagaatctatagaagaagtgttgctcatagtactcagattgttgaccaatcttaaaggagaaaccgtcaattaatttaccgagaagtaataacattatctttttcttcaattatgcacatccacaaagatttggggcaaaatccacttaaatgatattatacataatagatgagtattcatatgttgtaagagtcctggcttctttcctgcaaaatgattaaaacttggatcagaaaccaattaaaaatccattctaattcccaaatgtatgtaactgtactataagaaaaataaatatttcttcttgagggatatccattagttaaggatattcataacatggtgtcttgtaggaaatgttaatctttgggtgaatagggatgtttgggaataacaagactcaaagagatgttgcacttactcacttttctctgagttgttatttctgtcatttccccagtgcgcctgtcctcaactttgcctctctccttattcctttttttttttttttttttttgagacggagtctcgctctcttgcccaggctgtagtgcagtggtgcgatcttggctcactgcaacctctccctcctgggttcaagcaattctctgtctcagcctcccgagtggctgggattacaggcacccaccaccacgccctgctaattttttttgtatttttagtagagacagggtttcaccatcttggccaggctggtcttgaactcctgacctcgtgatccacccaccttggcctcccaaagtgctgggattacaggcgtgagccaccatggccgatccctccttatttctttttatctctacctctgcctcaatggtatttctctattactgttagcatttgctttctgtgagctcttgcacactgtcagcttatatacatgttcctgttcacatgttttcctgtccccagtggttacaacatgtcttctatctcagcccactctagaattgtcttacttttccaggtctcctgctcctcagtatttttcccacttttctagattcatgttttcccatctgcatatttctcttccatgtctgcactgtcatccgcttagaagacagcgcataaggacactgttatctgagcaaatcttcagcacagccaccatgaagcatggttaccttgtcactttccatttttcccatagtgtgtgcaaactgccctgatctgcatagaaaggtatcataattgaggaaacaaaatgcacaaaaatgtccttggttattccacccctcagaaatataggagagaagtaatttacagaattacacagaataacgctatgtcacatggacatggagttatcgggttagcatataattggaaaatatttcctaggaccttgacatttactcactttttgttttcaaattacatgtccctatctattagttgcaaattattttaatgcaccgtttaccaaagaaaggctgtttcttctgaaagctttcatttgacaagtaacttgtaaaaatattcacattgtgtatctgttttccccttctagtccaaactctagttatcttaaactttgcgcagttataaaaaatcataacaaaaaaagcttcctcgttgtcattcttgtcaaaacaggtttaccagacttaggtaaacttaaaatagttagtgtaaaagttaaaaagctgatttgctccttccagcgtgtttgttgcctttttgccacagcaaaattgtaaatgtaaacgtattccctaggagatgagctgggctgcaattttcagctaattgggagaagcagccctgagttgagcactgtcaggctgatttgagtcttaagatatgatgatgattattgtgtcaaatgtaatcaagaacgtgggctctgaactgactcaagggctggctgtttttaattcaggttcgtatatgaagtagacctccggttcaccgatagtcacagctggttgtagaagagagcaatttttaaaatgctatttcattctctatggagctctagggatcagagattggatgcacagggaggggacacatcctcattctctcctgaaaaattctattaattttcagtataataaactttctcttgagattccccagtggctctgtatcggtggttttcaaacttctcagacccaatgccacccctcttttcttttttaaataacaaatactttgtaataccttctttacgattataagccaaaatatgtagacaacataccctacttatacaggcaatagtttaaatgatgccgtaactctattttaaagagaaataagagtcatttataataaaataatatgtgttgtagtatgcagttattcaggcaggatcacactggaacacaagtgaagtttttagatcacgagactatcaatgcagtataaacaaatgcagaatgacaccattgtgttgtatggagactcaaataccatgaggggcattggtcatccatagcgtaattttccaaaatgctgaacaactcttggcaaaattcctaacaccatgaaataaattttttcttggatcgttatggcagttagttgcatggctgaaaaattcaatgtcttaaaatcatgaggaaaatatcttatgtttacgtgtaaaattgagttacgttccaggtttaggtgtttataaacagggtttccacatacatgcatgtccagtgggatattccaaagtgctgtcagacttgggagagttctttgttgtataagaagtctaccatcttcattccctctccacagaatgctattatagtaacactcttcaatcactgtgatagtcaaatgtcctccctcaatttctaggatgcctcttttttttgtggtctgtataatttggttaaatatctttccagacaaatactgatttgtgaattaatgaaatagcagtattttcggagcacctaacctatttctgagtgatacagttgccatttttacaagactaaatgaaattaccatttcagacctgccagattgtctagcccagtcttttacaattctgtgattatcactgcaattataatctattttcaccacttgaatggcatgatctctataaaagggtggtgataacactcatctattctccttcccctcacatagctatatcaatcgccccctaaccagttgttgataaatgcagttgaattttatgtaaaaattataagagatattattgtagctgtccaagacatttaaaatgctaaatgcaacttacgtggaggctataagagaaatatgaacccatttattgaagagattagctaatttagtaaaacaacacagatatacctgcatacagggataaatccctattgtctaaattattgagataaaataatgttttacaatgaaaaacttttagacaagtaggtaagtaaaatgcagcagtctatttgcatttcatctgggcatttgacaaagtctttcgttatactcttgtgaataagttggagaaatactggctagatgcaagataaattggatggcttagaagccacttcatgattttacgcaaaggatgtcgattaatagaccagtgtcaggtggtgatggaagatctctggtgctatgtcacaagcttctgttctcaaccctgacacactggatgtttttgacagaacatgagtagaactacagagaggaggcccatcaaacttatgggtgataaaaagcagggagggcaggagtattttgggtgacagaagccaaatgggtgtctggacaggatgcgttttaaggcacttttggtacttgatgtctgaagaccaggatcaaacttataggcaatctgaacatttgccaaaataacaggttaattttgacagaagttattatttgtatgctgtctatttctttaatacacctagaaagtattgaaataacattttttgcagacactcattttgaaaattcagaaaaaaaattgttaactttcgtggaagagtaacagaaactcagtcattgacagctaaatacaatgtgttgcccagtaaaatagtccaccccttcactttcatggctaatataaaatttgatgaaagatacaaattccaaagattgaatatctgtacatttgcaaagcaaaacacaattttgggcacagaattgctcattctcatttttaaacatcttggttataactgaacaatagttttttataacaaagataatattttcaaattattatgaggttcaactgaaataatttatgtgaaagcaatgtctaaactctaaaattctatataaatataaattattattcaataaattcacatcaagaaaattttaagttttttaagaacaagagcctatggccttgtttttagaagctgtataccttatcggtagtaggtttattgactttaattaaatttattgagtatctattaaattgccaggaactgtggtgtgaatctttgccctcaaataatttacagtaagttgtggttgatgaatggtgatgacgatgatgaatatccagactatagtaagtggtatattcataagtcagaggattcttaaaaccagatgcaccctcagattcattcctttcatgttgtacttctaattgaaaaaaataaatcctaaattatgactgttctttataaattttaattgatcttataaaaggccatcaatacatttcaaagtatctaggtcttttaaatgcaatttttcaccctggtaattaaaagtacgaaagcaagaaactttaaatctttattttgataagttttaattagctcaagctacttgtaatcccacatcttgtcttgtaaatcatatctgagccattaaaataggtttacaattagaagggcaattcttttagaatctacttaaactaagtcacttcgacaaattaattcatcgttcagttggttttattaaaatgtatttatttcactgtaaaatgtctagtaaagcaatgtatgaagtattttattttcatgttagaaattttatgtaaaagatatcccaaaatacatagacattcagatactctctgtatcattaaccaacatttactaacttatcatttagagaaggccaaaattgtatgtactataactttgtataatttcataagaattaaaatattcgattaatgcctgtaatgccttctttctaaatcaaatcctcaagcttacctcgagttcaaagttcagtatttattgtaacacatctcatagatgacggatgaagatggtaagcaaaggaataataatttcttttctcttttcacacatatatacacacataccccataatcctaattcatataataataacagaaaacaaagggcttttgagaatagtgacatattaatatccattatatttacttcacagggagactggcaagtctaccttgagaggtaatgtcttatagtacagtggactagattgtttcaagatttgtcatttattttggcaactcacccagcttccctgaaagttaagttcctcatctataaactgttcatgataattacaacctgcctcattagcctcatcaagctatttaaaatatgaaaggaggtgctatctgtggatcctgtcaaaggagcttgaaaactgcagaacattattttagtgtaaaatactataacaatacatgttgaatataaaatggctttttcttaacttttattttaagttcaggagcacgtgtgcaggtttgttatataggtaaactcatgtcatgggggtttgttgtaccgattattttgttacccaggtattaagcgtagtacacattagatatttttcttgatcctctccctcctcccaccctccccactccagtaggcttccacgtctgttgttcctctctgtgtccatgtgttctcatcatttagctcccactaataagtgagaacatgcagtatttggttttctgttcctgcattagtttgctaaggacaatggcctgcagctccatccatgatctctgaagaatctccacactggttttcacaatgactgaaataacatacactataaccaacagtttataagcaatgctttttctccagaacctgttatttttgactatttagtgatagccattctgactggtatgtgatggtatctccttgtggttttgatttgcatttctccaatgatcagtgatgttgagctttttttcatatgcttgttggtcgcatgtatgttttcttttaaaaagtgtctgttcatgtgctttgctaaaagggccctttcaaatgtgtattattaaccacaagagagtactgagtaagagactaggtaataaaagtcacaaatatttcgatatcataattcagaatttagatcagcggttatgaaattgttcgtatttccaaattccactgacaggactctactataagtttatttcatctgttgatatgtttttagccacttctttcttttaaagtgaatctgttgtgtgtttgccatttgatattagaaaactgaacctgcctgctttgctgtcttctgaatattatgtatcaacaactaacaagctacagttagttgttttgttctgtttttctctaagttattgtggatgaggatatatataactgcacagtcttatcaggtttgtaagagatgatcttaggctcatcttttaaattggtttttatactattttaaacaaatccttttaggagagaagaaaagctgcttagtctatcaacattaggaaatatatctttaaagagtttatcactgcaagtaaccaaagccaacttaaaaattcgcattatacaaatcattgagaatttatttagaacagaaatgtgtccaactataggtcaacaccaattttaagtgtgtaattatctgggaagtagtgttaactgcatttttttctaaagatcccttacagttgtataaatgcccaaaaggatattttgagtctctgtatattaaccaaaccaaatgtaattcattactcccaacattatatttcaacctctccaaatagtaccttttcgtattgtatcagcagaaaaatataaaatgcagatcttaaagagtatcaatctctttaaaaattcaagaaagaaaaaaatatgtgtgtatagagacgtgtatttcatctgctcataacactgtgtacatttctttatcaactaatttttttcagtgatttatgagttgaaatacaaatcaaatgaaacgggtaatgcaaagtaaagtagaaaacacattttctactgctgtctcctaatgcaggtcttttcaggaaagtactaatggttttagggaaagtgtataattatggttgtttccctaatgataaattcgcaaatctctattttaaaaacattcataaggttaaaaaaatgagagatgaaatgtgtctttcaaaattccttacgtgattgataatgcctatactctcttactatctaaagtctaggtgatatgtatattttttttaaaaaataaaatgtctgtatcagtgaaggaagtttacacagatagcttcaaagctgtggtttatctttggaggattaatctatttctcatgccagtgtgttgctactgcacatgttaaaaagtcatcctgtggtgtctggggtgacaaaagatgggaatgagttttctgagaactaatcagcaatactttgggaacatttaggtcatggtttccaattaactctggagagtttgagtaatttagtaccagacctcaagagagaggggatgaaaacctcgttaattcatatgttggtgaacggcaaaccagcaaatttgcattaaaaatggatttttattttaaagcaaagagcagccagatcttttctgcaatagtttgggtaggagaatatctttgtatgtatgtgttcccttatgtgtaggtatttgtatgtttcaacgaccctgcatatggcaataacagaaaattaaatttgtgctctaaaatgaagaccaggattcagtgacataatcttccttgtgcctttctttcttttagtacaatgaatatatcagagaggagtgtattccaatatctgtcttcagagttacaaaaacttcttttctagaatgcaagacttgggctatacccccagctctgccacttaacttgtatacaaccttgggaacatcattacaattctctcagaatcaatctctccagccctaaaatgaaaccagcaaaagcctgtactgtatatctaaaaggttttttatttttatgaaaattagttaggcaaacttttgttaagcatccatcactctattttgagataaagccttgctggatgatctccacctcttttgatggaaagagtaaaacatgtttaagatacatttatcacttgtttggcaaattgagatagaagtttatgaaagcagattgatatatgttacatttgagctactgggaaggactccagatggtttatagccttaattacattgtaactctagttaaatgtttacctatctgtaccctctgttaaacttgaatatgttaaataccaaagtccatgtattattggattttctgtcaccatcatcaggcacagatcctggtacacaataggtacggaatggatgcatggatgaattattgaattagatgttggtaggcatgtggaaataagaatgaggttcagaattaaagataatctgtatcgagtgtaaagccattggcagagaatgaaatatccagctgagtatacatagaaaaagaaggtaggtagaaaaatggaaaatatcttatgaagtgatgatagaataactctgaatatgtttgaaaacatataaagagttatgtggatgttagctttaaaaattatcttccatgctgtacattagatctgccattcttcatgctgtggatgaaaagcaagcatcagaagttaaattaaaatgatgtcatatattcctcgccttacagtttcataacagaggagaaaagagaaacattctctcattgccaccacccttctccagtcatatttctaggtagatgttgcccaaaaacagataaaaccacagagttggttttgctaggaatggactactaatccaggcaatgttgacagcttttgcttctcattagtgcacgttactaatagaattgctagagattaaaaggaatcctttctacaaagtgctgtatatccataggtgacaaaattctagcttcccctcacaagtacaatataaagttatgttttaaaatcaaaatgcaatttactagcaaactagtaggaactgttatggttacaggaaatttgaatttcagattaactctggttctatgagtagcggttgatatggcaagaatcattttgatcttacatccaggtgctactaaggtctctctgacctatatctcaccaaaaaaaggaacaaaataatgatcctttaatctttctcctaaaatatcataggaaatgatagtggctaaattgcaaataaactaggaaggaaagattcagagtattttatgtgattactctataacaatgccaggccatagtgaaagtgttatttagcagaagactgagttctttgaatgttcctaatttatcacattttaaaaataacctgggcaaaataacctttcatatcagattgagcctttttctaaaaatactcaatatgtttctgtaattatacctacacacttacaattccacagtataatgcaccgataaagtatttttcatccatatatctaatagtagaatggtgtgtatacaataattaagctctttaggcttaccccggaaagcaacaagtttcccttcctttttcctttttatgtattatgttggccataagaaattgatgatattcaactcaatgcagtcttagagatttattcagaaataccatggtgtgtgtgtgtggcgggagtagggttctaatgacaggtcagaacttacttatttgatttcttcattgataatcaggtcttaaaaagaaaatgggtatgctgaaaacatgccttctgtgattctttaccttcatgtgcagttgtctctggataaacactttctttggcacgtatagggttgcactaagctttatagctccaacactccgccccttcagtagattcttgcttgtaactgatgataatgcaaacctgtattatctataggtctccttaaagggcaaccaaaagttcagtagcaattcaggcacaattactgcatgtgagaatcctccatcttgttccctttggagaccacatatatttcttaggcaagtatatttttaaaatccttgttcagcatgacaattcaggaggtcaagttctcccagaaagcagattctgagaaagtgattagcatgaaggaattttattggagagtgctctcaggattaacacctgtgagcggaggaaaggaaagggagcaggattgggcagaaggagaagctgggctaccatacagtcacaactacaacacaatcaaccctccgcctctccttcctagccttccccaggaggatctctgaagtctgaaggtagaatagcccttcagaattgtcctgagttgcagcaagggacccaggattttataccccacaactctcccatcaaccaatacgtgcagcccgtctcggggacatagtgggtaactttgggctaggcacctctctttagctgagtccagctctcagacaggaataacagctgaggactgtcagccagtagcactaccagcagctggggtcagaagtatttcagtcctgaaaaggggtccgggcagcccagcttagcatctactatgccagtcgttctcaaatctggttcctggcaactgtgattctcaagctttagcatatattggaaggcttgttaaaacacagcttgccggattttacccacagagtctctgattcagtagagctaggctgaggcctgggaatttgcatttctaataacttctcagacgttgctggtgctgctggtccatggactatgagaacactgtttcatgctgcccttatttacatactgagaatggtacacagtgctcttatgaatagaatgaaaaccttttgaaatcacattattccttactccatcaaattctcagctatttttgtgcaccataaagctggaatagctgattataaaactttgttatgtaaaaaagtacttaaccaatacagtagattctgtttgcaaagcattattacagtttctaatatctggtcattgttacttgtaaaattcagccaaattttctccagggcctgtagtttgataacttggacaaaggaatttaaaaaaaaatctaattcaagacctttggttttttttctgaacatatcttttttttctttatgattcttatttttacattttacttatcatataagccacttaaacccatatggttccggaaaatttaaaactatatgatacatttagagcatgttgaatgcacagatatggaaattaagtattcttgactcattctagactagacctggcacaattaaaatttagggattcaacgtacacacacatagattccgagagaaatgttgaagccgtaaaacccccacacaagcaggaaacaacagtcttacctattattcaagaggcacgtaaaggagctcatttgaggagattttctgctgttattgccatcgaatttttaacgtattttccaaattagaaaatattcagcctgatgttgtcaatatttcagaccacaagggtatcatttaggaaaatggtttcttactgtcctgaaagagttactgttcttccctaagggcctaatttacaaagcagcaaacttgctggtaggatttggctgaaaatcacattgtctcggtagaactctttcatctgatttatgtgcattgcattttgcaaataactcttggaaagttatttactagttactttctctggaagcagagggtaagcggcatttctagtttaaggatagaggagctaagatgcatcaagcgcagctcatcatgaagctgatgctgataaaatgcacaatattacattctctaagtttcactctgccatgggagaatttcatatttttaaattttgtttgaaattggactacattagaaaatatgtcaaatgtctaaccctgcatttatattctggaatgtgacagcttatttctgttccaaattttgcactggagatggagtaagtcttaatgcaaactgcatgaaactgccacttttataggtcacacccagtcaattgtcagcagttacacatggttcaaactgtaaggtgtatgcccaattgtagcattgagattcgtggagttgttgcagtggttctgaatttttcaagcatgatacataaaaagataaatgactcttttgatatttctccttgcattgatagtttgcctgaaaactagataagcagggagccggcagtccacgttagcccttgaactacatgaggtttaatttatttgcccaaccagaaccctacactacctttcagctgtgcagtattaaagtttatttaggagttgataaatagcttagtgcaatgcttccttttttccagtagctacatcctcataaacctattctaccctccaccagttaatgcagacagaagatttttatccagtatgagcactgaaactccactgtggaagactgtgtgctcagcaaaaacctcacccatgatgaataaacagctcttccgggggctttgctgccgctggctcggcaggagttgtttattgcctggtttgcacatcccatgataaagttgctgctgaaataaattgcagttttgcataattattgacaatcacatcttaacaagcaatgtgtatcatattcaagtgttcaattttttaaaatccatttttagcttatgtttaatcccagaaagtgtttgtgtagtaatagaaggcaaataagacatttaaatagagtactaatttcctcattgcagacaaagtttacctgaatctttttccataggactgttactgcctaaggcaattttcctttctaagctattattatatagatatttgctgagggcatatgtgtgtgtatccacaatacatgcattttatatatatatatatatatatatatatgatcaaaaatatgaatacatttttagagtttttgtcatgaaagagtttgtttcatctttttaaaatattacaggaatggggaaatgggatatgggtagaaggaactaatgtttttgagtaactgtaatgtataactgtataacgtggggcactcaacttcacaggaattttttattttaattctcatcacagcaatagatattgcagatgagaaactgagaatcagagagggaacttgccatatcacgtaagtggtaaagaacactgggaattgaactcagatctgcctagtttttaaaactctactctttttcattacacataacatttttattttggaaaatgttctcagttgtatgatcaagtagttaaatatgaaactaacacaataattataactgatgtcatgcaaaatgatagtttgcacaaaatgatagtttctatgaaatgttatttctttacttgttaagtctttcttcctttgccctccaatccccttctttttgtcttttcctctagtcttttccttttgattctaggtttgtattttcttgacttttctccttgcatatcaaatccttgttttctgcctcagagcagcatcaaagacaagcatggtacagggattttagggttttaactataaaggtttgtctcaaatttggcagtatattaaaaataagctttcaaaattgaccaacaaaaactacaaaattgaaaaaaaggtactttgaactttcacatgttcaaatatatgtatatatatttcacatatatatatgaaacctcctctgtggagaggggtttatagaaatctgtaattgtcattcttgcatgccttcccccatacaaacgcctttaagttaaataaaaatgaaagtaaatagactgcacaatattatagttgttgcttaaaggaagagctgtagcaacaactcaccccattgttggtatattacaatttagttcctccatctttctctttttatggagttcactaggtgcaccattctgatatttaataattgcatctgaacatttggtcctttgcagggtgagtgagcgagaggctgctttggaagaaactcatagattactgcaacagttccccctggacctggaaaagtttcttgcctggcttacagaagctgaaacaactgccaatgtcctacaggatgctacccgtaaggaaaggctcctagaagactccaagggagtaaaagagctgatgaaacaatggcaagtaagtcaggcatttccgctttagcactcttgtggatccaattgaacaattctcagcatttgtacttgtaactgacaagccagggacaaaacaaaatagttgcttttatacagcctgatgtatttcggtatttggacaaggaggagagaggcagagggagaaggaaacatcatttataattccacttaacaccctcgtcttagaaaaagtacatgctctgaccaggaaaacatttgcatataaaaccagagcttcggtcaaggagaaactttgctcagagaaataacttagggattggtttattaaattttaaaagttgacatttttgagtgtttatttaatattttacagggaaagcatctgtatgaattgtctgttttatttagcgttgctaactgaatcagtttcccttcattactttcaaatatgttttgaaatgttaatctggcattttgtagctttcttcctaacatgatctgtgaaaataagaatgagatggctgaatttgtcgtagttaatgatcaaacaattttcagacaattgtttttcctagaaacaaaaattatttccataaagttccatatgcataaacagtgaaaacagaacgtggggtagttttgtttaaatgaagtcttggtgagaatcatattctgtagtacaaggaggctcttaaagtttattctcaatacctgatataattttcctgaactattatggagttttgttatgtatagttggtttttctgacttgatataataactttactagtctctcaaatacaatttggatataaatcattataataagatgattgattttttagactaactttattttttgatatttttaaactattatgaaaaactattatgaaactattatgatatttttaaactattatgaaaagtatattctagtttgaataattccagaatcaaatcataataagcagaagttcttctcctctccctcctatcgttctccttctcctgtttttcttttttgatatgatagttgatctactttgctgctctgttgcatagagtacgtaacagtggcaatgtatggctcctgaatttatcgttcttgcttcatcatcctgctttgaccccactttctcctccaaaatgcgtgttgagttagtttgatcatttggaggtaatttgtttggaacagtatcagactttatagatatctcccatggcttgtgatagaatataagggcaatgcaaatgtagagttttttgctcactcttcgatgtatggttagacaatgtaccactgtaatatatttggcttaggctatttcataaataaaattttattataaaatattataaatgctgataaagctactccagaattttaatagatatgtgggtttcccggccagatgcggtggctcatgcctgtaaccccagcactttgggaggccgaggtgggtggatcacctgaagtcaggagttcgagaccagcctggccaacatggcgaaaccccatctctactaaaaatacaaaaattagctgggtatggtgacctgcgcctgtaatcctagctacttgggaggctgaggtgggagaatcgcttgaacccaggaggcagaggttgcagtgagccgaggtggcgccactgcactccagcctgggtgacaaagtgagacttcatctcaaaacaaataaataaataaataaaaatacatgggtttacattttacccatcagctatggtaggtaaataataagctttgattaagtctattttagtctatttttagcagattactttgaaaaataaagaataacccaatgactaaaaaattattttatgtcagggatttaataaaacatatctttaaatctagttgagggcaaaaatacgtctattttctactatacaatttgtatttatatctgctgtattatataatgaaaatttatctctatttctaatctcaagaaactgcaagcttctgaatcattaaagggaagattcaccatgtgtcctaactatatttactatggaagcatggaaaataaatattttatgtttagatttctgatctctctttcaaaagcagttggaaattatgctgagaaaatgtcttagcttatcccatgttactcaagaaaatgtatttattcgtttttgtccagtggcttaaccaaaccacagtttatttgttgctcacataaagtccagtgtcgatcaggctactcttttccatctttgagctaaggcacatattacacataactttcagtgtacccgaggtagaaaaagagagagcttgggaataaggcaggggctttttactgtctcaaccccaaagtgataaactacatttattctcaaaatccagataaaactcccatagagcctctgaaaacctcaacatttgcgtcttaactataataaggttaactaagattccaaaattattttaaaacagagacagtttccctcttccctggcagctaatattgtattttctataaatccacttgcccaaggtttaaactacattttatggattgaaatgacatttatagccaactcctgatttttagttagatggttggataatgatcttttgatgaaagactcggagatgtcatggtaaaacggtgaactactgaaactattgattattgttaatggcacatttcagctgattgaattgagtcaagaaactggtgttgaagagcaacaaatggaaatgccgagcttgaaaataaataaagcagcataccttaagagattacatgcaatttcagtatttcagctaaatggaagtgtttgctttttttcctctatgaatttttattttgaacaaaaggaattttctataatatgtaggtaggagaaaagtgaaatggcatgctttttcacttcatttgaagaagctggtagcattgtattcatagattcatgctgtatagcaatcatagttctcatatattaaaaaaaaaggaaatttgaaatgcctagccaaagcaacagctctgccaacagattttgatatatctgtctaccccaaaagtagtgatgatttacttcatacaaatgctagtgaatgaagagagagggtgaaaaccttcacaaaatgtgtttttctctaagactgtcaatccgtttttctatatatggagactccagctcttgctagactacctatcactttcgtctatcagccacttcgtaagatatttattctctcagcaataatcataattcatagattctttaaacatacatgtaatataaagcatatacattctgaatggaattaacatgattaattcttctctgaaagacattagaatttcctcccgtattataaaaaggtgtaactcactttccttactaaaatcaagaactttaccgtcgtccttgtacttcaggataagggggtgtttcttataaatattgttatttctgatatgctaactggaatttttaagcaaatgtatttttatagaacgccatacaaagcctttaggggtgaaagtttcaggatttttaaattgcagatttatcctttaaataaaaaaactatattcgtaattgaatcggattatttctctatccaaaacattttctgctttgggcctaagaagagttgacaaagctgttcatggttcaaagtactaccataaaaccctgggtaactaactgaaaatggaaagactctgtctttctgaatatttcacaagagtttcacaaatattaagtggttctctaagtacccctgagagatcattgtaatattagcttgtaaagacaatgtgggggtgtgggtatgtggtgacctttatgatgttcataaaggtggtgtaattaacatatttttctcagcaagacaaactaaggagcaataaatatatgagataccttcatctgtgatctgggtcatgtctcaggccatatctttcaaatcactcccttccctaatctcgtgttttacctacgtctcctctcaatccccccattataaaaattgtcttctgatgaataaaacatttccagagagacaagtttcataaagtttgaattgtacatctgagtacacctatgaattaagatatctttgatttctaatatgttattaaaattgggtgtggtggctcacgcctgtaatcccagcactttgggaggcagaggcgggcggatcacgaggtcaagagatcgagaccatcctggccacaaggtgaaacccccgtctctactaaaaatacaaaaattagccgggtgtggtggagtacgcctgtagtcccagctactcaggaggctgaggcaggagaattgcttgaacccaggaggtggaggttgcagtgagccgagatggcgccactgcactccagcctggtgaaagagcagactctgtctcaaaaaaataaattaaaataaaataaaataaaattggagaagtttctcaccaaaattttggcgcacggattaattctgaagaaagaagaaagaatgcaatcttagtagcacaattagtaccttgaataaattggagtatcgtatttcttggactatctgagaatgcagaggcaatttaaggatccctaattctaaggagaagaaacctttagtgtattccttcctgttgctttagtttgaattgagttttatatgtattttttaatctttctattttgattgttgtctaaagagtgtgaaagtgaattttgatatttttattttgcctggcgatgaatgccttctgctctggatatttaaaaattatatacacatatatgtgtgtgtgtgtgtgtgtgtgtgtgtgtatatatatatatatatatatatatatatataaaatttttctgagaacttttattaattcagcgtatctttgctaaacacctgccatgtgtcgtggtgttaggtctggtgatacaaacatgttcagagagatgattttctttcttttttggggggtgggtaagggaaagaaggcttatacaacagaatcttatttctcacagttctggaggctgggattccaagatcagggcctggtgagggcccctcttcctggtttgcagatggcttccttctctctgtgtcctaacatagcaaagagagacagagctctgatgacacttcctcttgttataagggaactaattccatcataagggccccaagaaaggtgcttttcaaaaacagttcagtaaaagtactgggttgtataatcactttaatgagtatcaatccatatttttaagatagaaatgaatgaaattagtaaaatagaatagaaataaggagtccatcacttttaagtaagtttcaatattgttcgtaaaactttggttcggtggtttgtgtgtgtgtgtatttgtgtgtgtgtgtgtgtgtgtctgtcggtgtggaaatactggatcactttgtaacatatattcaaaagcctctgtattttaacattatttctgcctttgagaggttcacattccagaggtgaagacatacatcctaagacaaaattataatagcattatgagaattacagtagagagctggacagggtctagcaaaaacagaagactaggctaaaccttccaaagaggccaggaaactcacctagaacggtggattttaaccttgcttatgcactgggggagattttaaaaatatctctgcccacaatagataccaactgaattgagcatagcatgtcctacccatgaatctattgtccagtgagaacctctgtttagagaaagtcaccttagaagaattgttaggagttatttaggttcatggggttgaaaagagcattcgtgatagaggaaacaccatatccaaaggcttagtcagtgtggtagtgtgagaatctgaaggaacttggctggggtatggttgctacaagaaatgaaattagatcaactggggctaaattatgtggaaagacagcatgatgtagcagctagagtatggaccttgtaagcaggaagaccccttatttagcacttactagcttattgtctgacctctgagtcccaattttactcttctatacaatgagtacatcacaggattttatcaggtttaaatgataagatatatgtaaaatgcataccagagaggcagactattggactcgaagggctcagtaagtgtaagctggctctctctgccccttgccacctatttttcagactctggacttttatcactttaagtcatagcctagttctaagcaaggaaatggactaatcagacatgtttttaaaagatcattctggtagtggttaggagaatgaattggaaagatatgagacccatgcagggacaacagttaggacattatttctgtaataagccaagcaagaattgatgatcaaagtggtgaggttgaacaaacaaaacagatacgtgagctatttggagataaaatcaacactgtcatatgttttgtgggaggtggaggtgagcagaaaatgtgaggtaaaatgagaaatcagtgcctgcttaccacttggcatgattgactgaaggtagtgtcttcactcaatcatgagttgcagaattcaagatggcaaacagttgtgaggagcaaagtcaagaacgtgtttgattttgaggtatctgtaagtgaaaaatcagaggtgaaaaccttacctctcttgaagcagttgtgaatgtaaatctaaggtttggaaaaagatctgggttaaagatttaaaattgaaggacatcaacatggaagccatagaaataaattatattacacacaaatttatgtcgttatttgaatttctccatggtccactcagaaatatatctaaatgtcaccaaaatgttacttactgtagtacagaattggtattaagtgatactattgtccatgttattcaaaaagacagttatagggaccctcttaataaactaattgtgaaaaaggcaaagaattagcaaagctttggcataaaattcatatcatgggccaggcgtggtggctcatgcatataatcccagcactttgggaggctgaggtgggcagatcacctgaggtcgggagttcgagaccagcctgaccaacatggcgaaaccccgtctctactaaaaatacaaaaattagccaggtgtggtggcacacgcctgtaatcccaactactcgggaggcagaggcaggagaatcgcttgaacgtaggaggcagaggatgcagtgagctgagatcgtgccattgcactccagcctgggtgacacagtgagactccatctcaaaaaaaaaaaaaaaaaattatgtcatggaaaaagtaaaagtctttgcataatgtatccaagatcatgaaaaactcttttcaataagataattagttccttttcttatataaacatggaaattttcatttttccttttattctcatattgatactataaaaaccccatcctcattcacaatactactgtctctaccctcgatagataccagttcaattgaacgtagcatgttctacccatgaatctattgttcagtgagaacctctgactataatgctcaggaatactcaagactcacatgattgtcttcttgctatatttagttactttattattttccattttgggaccctgaattcctgtagatctcagagaaaatccgaaatgaaataatgaaaataattaaaagtttagaaaagggagtcaatggggacaaatgttcaggactggtcttttatctcctgcaggaagaaagactgaatgcagaaaattagaatccatttttcatccagtcaccccaatttaatgcaatatgagtttagctatttgattttaagtgttgtaccgttttggaccatgttaccatggtaacatgaaccatgtctcattcatacgtaaacatgttaattgtattaaaacctttaaaacctacttctggatgttgccattacattaaacaattatctagaatgatacaaagtaatgactaaattgaataactttgtaaattaactattggattttgtaattttatatctataaaccaaaagaaaagcccacattggtaagaagacactgtgcatactgaaaagtcaattttgttagcctccaataaccattgtgttttattcctcgcagagcttttgtgaggatcttataagggaataaatatgaaagcactttgaaaaagctttcaagtgaaaggtccttattaattttatgaattaccattaaacaaaagtcaaactgaagatgtaaatctaataggatgctcttaaaagtcaatggatcaaagttatattaattaataaagaataataactaaatattttatgtttcataattggcaaagtatctttactgtcattttctaatttgatccttagtgaaaacctgtgatgttggtactcctattatttccattttcatttgagaagaataaaattggagaggttaagtaatttatctattgctacttgttaaaataactactaaattttattactcccagttaggagggcaattatataaactaaaagcttgtcacaataaatgtttacttttctgggattaaagtcatcatgtatttttcaattattaaggggggtaataataataatagctacctttttaaaatagttactatgtgccaaggtgtgtactaagtgctttgcttgcatgatgtaataccatcgtatatttagtacagaggaaaaactgagaggctgggtaacttctactaaggtaacacacaagtactggttgagtatcccttatccaaaacacttgggaccacaagtgttatggatatcaatttttttctgattctttttttggatttcagattttttcagattttggattacttgctttataattatgggttaagcatcccaaaccccaaaattcaaaattggaaatactccaatgagcatttactttgagaatcatgtcggcgctcaaaaattttcagcttttagagttttttggattttggattttcagatttgggatgctcaacccgaatatatagaaaagtcagcatttgaacctaagtttgactttctgatcttctaccaactctactgtcctacccattactctacattgactcagcattacagggaaagacccaagatcaccaaaagcaagcttcaaatcactcatctaatagaaattagtggaaatatttctacttcctaaacatccatctttcctttacattttaaagtcaagtttctacatctgcctcccaactgaaacacttctctatgaaatcaccataactaccaaatgcaaatatttttatcaagtcctcattgccctagaaatctactcatattttgttattactgctcactacagcctactgaaaaatgtctcaccttttgacttgccagggtgatatattatactaattgtctccttgtctctctaagcactcattccttcctctttctttcttctttttttttttttcacttttattttaagctctaggggcacatgtgcaggtttgttacatgggtaaattgcatgtcatgggagtttggtgaacagattattttgtcacccagataataagcatggtacctgataggtagtttctcagtcttcaccatcctcccaccctccaccctagagtagatcctggtttctgttgttcccttctttgtgttcatatgtactcagtgtttagctccacttataagtgagaatatatggtatttggttttctgttcctatgttatttcacctaggataatggcctccagctccatccatgttgctgcaaagaacataatctcattcttttttctggctgcacagtattccctggtgtatatgtaccacattttctatatctgatctaccattgatgggcatttaggttgattccatgtctttggtattgggaatagtgcagcaatgaacatacagctgcatgtgtctttatggtagaatgatttatattcctttgggtatatacccagtaatggcattgctgggttgaacggtagttcagttttgagttcttagaggtatttccaaactgctttccacagtggctgaactaatttacattcccaccaacagggtataagcattcccctttcttcacaacctcaccagcatctggtattttttgactttttttttttttttttttttttttttgagacgaagtctcgctcttgtcccccaggctggagtgcaatggcgcaatcttggctcactgcaacctccacctcccgggttcaagtgattctcctgcctcagcctcccaagtagctgggattagaggcgccttccaccatgcctggctaattttttatttttagtacagacagggtttcaccaggttggccaggctggtcgcaaactcctgacctcaggtgatgcgcccgccccggcctcccaaaacgctgagattacaggtgtgagccaccacaccaagcccacagtatcaattctatgcattcttttctgatttcattaatctcattatcttcatttgatatttagtcaatagttactgtcagttatgtgttagttattatactagaaacagtcttttctccatctcctttaatccaatgatttgaacatttttattcctttccaatgtctgtcccacatttcttactgtatgtaggacatttcttactcaaatgtctcacaaatgacataaattcagtatgacccaaataggccattttttataccaagtcttatttcctatcctgctgttcatcccggtaccatcttttcagtcagagagttcagatcatatagtcatttctaaatctcccacttacttgcctcactttcaagttcatttttaaggtctgtagattctgcctccctaattctttatgaccattcctttctcactagccccttacctccactctcattcacactcttactattttttaccctcctccactcattcctgcccaccagtggctccaatccaacttgcagatttccatttaaattaagcttcctaaaacatagcttaggttgtaactacaatgcaaattccatgagagcaaagatttcatctgctttattcacttgtatatatccattgtccaagactgtgtgtgtcacatgaaaagtgttcaataagtatttgtcagtgaacgaaaataatatatgactcccctcttcaaacaccttttttgacttcaaagcccttcagaatattctacagactccttcacctggctctccacaattgcccctgagtctcgtttccaatcttatttcttattttacctctcaatgcaccttcaactcctactaaaatgaacagctagccagcttacttctgtgtctttcgatgatcttgttttttgtcttgagattcctttttttcatctaagcttacccaaacattacctacttttcaaggaaagccattttcgaatcttccctttttccctgagcccccaagctggaagacatcttgtctccatctcaattcctataggcatttctctgcactttaaatgacgtttagtacttctgacattgcattagagagaggctggggtggatagtgtttcatagtgtgaactttgaagcccgactgcctgagtttaaatcgtgattctggggcttactgaccatagacgcatttctgaattgctctcagattatggagcataaatcaaaagtaatgacagctacctcttcaggttgttgtgagggtgatgcgaattaatgtactgaagtgcatggaacagtttctggcacacggtaagcacccaataaacatagctaatattatgttattactattttcaggcttatttttatgtatacatatagtatgtaattttatgtcaatatgtataaatagactttggtattgtttatttcactatcaccttgagagcacaattctcatttgatttgtgtgagaaactacttagaaagaaatagacgtgtgaatgaaactatgcttgaaatattggttactgtgagtgttgaaaatccattttgtttaaagaaagcttcaattgttaatcttccataaattttagttcttaagcgttcatattgactcgttttggaaaagctctttaaagtcttgggatataaacaaggctgaataccctcattcatgataacaaacatattatactgaaaattgtaagagagatattttatctttcataatgccctccttgggaaaatacattgacttggcccttctctttcaatcagacaccaaagttgagattgcctgaaacacagtttggtaaaaggagtttctttttcccaaacatcctgagtaacacaggaaatcacaccaatgactgatagataacgttaataaaattaataaagttgttttaaatgcataccatggggcagtggcaatgaaaacattgagaaggctgggactatttgccaactttctttgatctccattagaacctggacaagatccacataatttcagaacttcttctccaaacaagaattgaaaaggtcaggaaaagtttgaccacagaaaaatgtcaaagaattttgtgtcactttctcctcctcccttcctctaaccttgaataattttttagggttattggtctttgggagcagactttctagaccaaaacaaaaaaaatgatattcctctatgtgataggtaacaatcactacccatcctactggaaaattctcaaagtgtaaattgaggggataaaaaaagaatcttaagtcctttaaattatttttaagatgaactacattagtgcctctcttgtgcctttcataattctgataataaaacattccaggtattagtcaaagattaatggtattgaaaataatttaggttatcagcatgtgattttcattccacatgaggtccttttgcagtttacatggttttctaaattatattaaaataaaatgtcagaaagttcacatttttttcatgtttaacagcatcaatctttaaagaaaagttattgcacaaaggtctgtgcataaatcagccattctccgaagaggtaaaagaagtcattacgcctggttatgagagagagtttcatgaatgtaagagacataaatcatttcccactggagatcatattagtctagatggaagaatgtctgtttcttgatagtgagaaagcaacaaattacttttgtttgctcctgagtctgtggttgtccttgagaggtctgttagcatgttgactattgactattcaatattagcattataataacttacaatgatctgagtcacataaatataatctttcagttctctaaagattttactttttcctctctaatatctattcacctccaacacctttgcaaatatattattctctgggagttacaaagaaagttattctctgcaggaagcagcatttcagttgctctcaggagccaaccacatttcacctcaattctttgctcccaattcaacaattcaatattggattaaattcaaggctgtgaccccaaatagaatgagacctggatatttatgaaccacttgaccaggcattcttcccatgatttactccataaatcctttttagtttttgcagtagctttacaaatatttggaaaatggctgtgcaatgcagttttaaaaagtgcaatgagtagaggtagcttcttcacctggtatggtaaattgttgattctcttttggagtggaaaacaagtgttcttatttggatgcaaccattgcattgattagacaaccctaaattcatctttcatccatgacctgaaagaaattttgaaattcatgcaatatatacccgtagtggaaaatgtactttttgaatggattcctgaatgtgacttttaagaagagctattaagaagtgggatcttctacagaacagtaaacaggcatgaaaatatacaagttgataagatatggaactaccccaaaagaggaattaatagtggtggggcttggggcaggaggacagagagacctagccaaggaaggaagggctatattataatagagtacaaagtcctttagtcatccaagagaaggggcaccttctgcatcccttatgagtaagatcagagaaggtattctagttaacttttgctacataacaagccagcccaaaacttcatggcttcagtaaaaattacttgttttgttcatgaatctacagtttgctcaaggttcaatggggcttgcttatccctgtttcagttgatatcagttggggtagattgcctgatgctggaggattcacttccaagagggctcactcacatgcctggaaaataggtgctgactgtcagtttttcttcatgtggacctctccatggagcagtttgggctttttcacagtgtaagagttgggtcccaagagcaattatcctaagggacaagaaattaaagctgcaagcttctcaaggcctgccctaaaagcaagaatggttttgcttctcccatattctatttgtcaatcagtgacagagctctgattcaaggggatgagaacataaactccacctttccatggagaagtatcaaaaagttttgatgccatttaattaaagctgccatacaaagtttcttataaatgacactgagctgaatgaatactaaacagcaagtagtcattatcccagtcaagagaagttatctttgctcagaataccctttctctccttgtctacctggaaaattcaactcttggccaaagccctacctcttctcgaaagcattaccaggccttgcctctaagtgtacaattggagatacaccagtatactgatgtttttaaaactttaaacttttttctacaataaaacataaattaaataacttcccttctgacttaaaagctgcaaaatgctcatgacagtaactatataaattaaaattaaatcttaagcacgataaatacctctcgaatagcaacatagatgcttacttctttatttcacttctttatttgcttttctttgtctatagtttgccccaaaggtattttaataatatcgggttccatgtataccagtgtgtaccaattaatatttagaatatacctgttaataacctcatttgcatagccctactaatctgagcacagcgcagccttaagaaagtcttagtttttctcagtttagttcatctctcttctcttctcctcctgtctctcttatttcctatttctttttcttttcaagtgactttcaactaagtagaaaatgcatttcacatcactatgccggcctccaggctctgtctatttcattcacccaggaatgccctttctgaatgctttctctcatttagcagctatctattgaagttggacaaatgatagaaattcatttcttaaagagccagaacatcatcttgaacaagaagttaaaagaattcagcaaatcaaaagatgagctaatatgggtgaatcttagaggcattatgctaagtgaaataaaccagacacaaaatgaaaaatattgtatgattccactggtatgagctacctacaacagtcaaatttatacagacgtaaagttgaaggatgttaccaggagctggaggaagaagagaatgagggcttattgtttaatgagtacctgagtttcagtttgggatgatgaaaacattctagagatggatagtggtgatggttcaacgataataataatataatattaatgtacttaatagtactcaactgtatacttaaaaatggtcaagaaaatggtaccccgttatcctgatgtgattattacacattgtaggcctatatcaaaatatctcatgtaccccgtaaatatatgcacctactatgtacccataaaaaaaatttaaaggctaaatggccaggcattgtgggtcacttctgtaatcccagaactgtgggaggctaaagcaggaggatcacttgagctcaggagttcaagaccagcctgggcaacatggcaaggccccatctctacaaagaattcaaaaattaactgggtgtgggagctcatgcttgtagtcccagacacactggaggctgaggcaggaggattccttgaacccaggaactggaggaagcagtgaatgacactgtaccccagcatggtcaagatcccaaatcaaaaagaaatgattaaaatgatcaattttatgttgtgtatattttgccacaatacaaaaatggggaaaagcctattcgcttttaagtatccttaaaaaggcacagcttcttcagctaacagactctaaaactttttttaatagaagtattaaggtatttagagagtgcaaaatatcttattttaagtcaagaagttagggtcctgttcctaaacactagcctctgtaatcctggggaagtcagtgctgttggagatctcaggttgatcttctgaaaaatgatggatctaggtaaaagatatgtttctccaggtttacataccacggacaccatctttacttggaaactttattaaaaatgcattgtgtcagaagctctctggggatgggtcgtggaatctgcatatgtaaagagcccctaggtagttcttgtgcccacttaaatttgagaaccactagaccagatgttttgcttatggccctttcagctctgaaatttgaaaaaaaaaaaaatgattctgcaagacagagtctctgtgcttttgcaggataaagaaatgaagaaaataatacttcctgcttgtgttggagcatttttttcatttggtatccccatctccagtggctagccaatcaagaatagtattgtttattcttcccactgttttgaagatacaaaaggaaaagctaagccagatgacacctaaaggcttccattaccattttcatgtttttccctttgcataaaaactgtccatgcctccatcagagccatgatcactagtacaatgttacactctaatgactcatgacattaaattatatcttagcctaatatgaccaaattacaatatcagaataaaaatttcttttttcaggttgaatcccataacttaatccaattataatactggctgaatttttcacaattatgtctcagtcttgatttagggaatcttctctttatcataaaaatgcattttgttaaacatgtttcattataatcaatttctcaaaagtaaagttaatcaagagaaggaaaaaaggttttgttttgatttgatttggaatgtgtatgtgtgtttactgtattgaaatagattctgtctgaaagactgtatataagataaaaagtacagaagagtagtcagagagttattacccacccctgactgatggtgaatagattatctaagtatcccgtaaaaggcacaactccttcaggtatattttacaaattaattagtaactttctagccaaatttgtgtcttaaagacaccagctagaacttggttagttctagcaaagaagattattttattctgaaacaggtttttgttgtcgttttacttatttgaacttttttcttgaatatgtatttctttgcacataaaatatattgacttatgaatgtgattaaaatggaaaataattagttgattttagagagacagagagaggagaagagaagtgtgaaggagagagggaggatagaaaggagagagggagaacaggaaggacagagggagaatgggaaggagagggagagagagagacagagagagaggaatggagtgggtaataagcaagagaaaaatgccaatcatatgctttgctagtgtgtaaagtctgataacccaagggagagaggactactctggcctagtgaaacaaaggaaagagaaatatggtagaatattctcctggtgcttcaccaaatgtgacaccagaagtctgacagaagtcatgtcagcatttgagctccataaaactcaggctatcgacctaccatgtgagagtctcaaaatgagtttaggtaggggcagaggagttgaaatccagtaacatatgcaacagtgatcacaccaggattgcacatagaaagcaaattagtcctctaatagagacgccaatttgaaattcaccctctgagcaggtttttaagcacactcttcttttacttttctatttacaaaaatggaacaccaccagaaaaacaagaatttgaaagacgagatgagaaaagtaagttgtaattggaaacagacagaatgtgtacacaaacacacacacacacgcacacacacgtgcatgcacaggtgatgagagagtagtttgcctacatggtgtatctgactaagaagactttttgctctggttgtcttacaggaagtgactaaatctcatgatgtgaaatattttcttgcatattgtattggaaaagaaaataattttcccaaactccttaggggcagtgttgtcttataattcccatatagtatatgctcttcaagtaagtaactccagagttgagtaagacaagactcgtgactcagatggcatgctctgctccctagactagacattgcatcagtctgcctatactcacatccgctgttaaaggattgcctccagtaaaatatgtcttttaattccttatacaagaatctggaaaaaaaaagtaagattctctatttcttaaatttagcagcaggttaatcactgataacaataaaaatacataacaatcatctagcacgggtaaatattgtggcaaaaattacaccctgaagaattcagtcaaagatataagtaagtacacatcattgtcatgttccacaatatatcatctgctttaaagaaactgttatgtagctgtagtagatttaatcattaatcccatttcttctccaccttctgcaatcacaaccttaacaatgcctccttatgagtggaatgtacttcccaacccctagtcttaggggttggccatgtgatttgctttagcaaatggtaaatgagcaggagtgagaggtgacagttttcagcctaggccttaagagatctatacattcctgtttgtgcttctgctatcattctgagaacacgtccatctaggctgctggtctcaggaaaacgataaaagacatgaacagcagggctgcactagccattcacatccaggaaaagaaatgattgttgcataaagccattgagctttattctacattactgtgacaatagctaattgaaatagtaaatatactttggtttttcctaaatgcatattgaaaattaataatattagccatctgtatgataaaaatataaagcctatgttttattttttaatggttcactgccctaaataaatttccaaaaagtagatgttcccttgtctagtgatgtcattatattttatttatacatcataaacacactgtttatttctgctcatttttttgtaagtaacatgtgttaccgccaatcttgagatgatacacacacttctgtactaaattttggaaaacatattagctacccactccttatatcaaaatattgcctaataatgtgttttgttttaatccttcatgaatttccaggagaactgaactgatacttgggtttgtgagatatatgaaaatagtgaacatgaacttctggtttaacccttgtgatgataatggaatcatagctctgttaattactcttgtggtttgtcttcctagagataatcatgtacaaaattcctttccaatttgttatataatattagaaatacttccaaaattggcatggatttattgttatcatttgttggcacaatcattaaaacgaaacccataaagctagataattaaatgtttacaaagctatagtactcaaaacaaaaacactgtgaaaagagattttttaaataatagtttttgcatgccttttgaataattggattattctgaatttcttcatgtttagtccctgaatctaagtcataccgtctacataaaaatagatgtcagctgaagaaaaccaggcaatggatttgtcttgacgacaatctttttatatgttcagacttcatttaacattagacttgtctgtatttgaaattggtatttctttacatttctgaatttagggaaatggcacaagagaataacattaatttcctctgcattttggcctaatcaaatttgagcctttcaagagacacagccaagtcaattcaaagagacatatgaaaagactactgttaatgtatctttaaaatgaattagcggcatgaactgttgctaggtgagttaggtatagttgtagtttttagtaaccctaagagaagatgcagtgcattctaaaatgtcacaaggagtttgattgctcaaaattctgggagattggctctctgcaaggcttcttgatgtcattgttcctagaggaatgttgttccagtacctatagcgattgcagccataactatttatgtgtcattgtagccattgttattactacatgcttcacatacctctactgaggtctaaagaattagtggacttcatattctggagagaacacttgaagaaccaaacagaagtttgatgtgaatctgcatatccaccattattgttcataggttctcaggattagttgagtgatgccttaaagaaagaaagtcagatgataggtcttcctgctgcccgcaccacatcatgagtgttattcctatagaggaggagtaaagagtgggaagaaaatgaaatctgtcaatactgtgaatatataaataataaaagtagcagtaggactgattaattctgaatcatctttatgaaatgactggagccgtgaaaatgctcagtctgcacagctgattgagaaatgtatgcaatctgttgatcggaatttatttgtgaatgctctcttccagagatttatataccagagttcttaaaacgaattttgtccccatgaaaagaaaactacagatctgtaagactgcaatttaaaatggaagaaaacatgttcccacttgaagaacaactttcaaacaaacaactgatacaaaaaagtcaaaagctgttttgttttatataatagtttcagaatacttccagtcaatatataccttggtttggtgaaaaaataaaaagctaaatccttagatcattaactagaaatttttgtaaaataaataaaagccgtgggttttagtgcagtgatcccatgaagaggaatatattcaccattggtctcttaatctcagatagaatgtacatgttactttattttataacgaaagcaactgtgttgtgatattatgtataatattataacaggagaagtcctcttagctaactcagtaatcaataacattgtacgttgtgtgttattgtaaccaaaaactatgacagaaccccatttcataagatcagtttatccacctatatgatttatatttgaatattcatttcagtacttatgttgcttaaacaaagctactgtattagtccattttcatactgctataaagaactgcccgagactgggtaatttctaaaggaaagaggtttaattgactcacagttccacatggctgggtaggcctcaggaaacttacaatcatggcagaaggtgaaggggaagcaagcatcttcttcacaaggccgcaggaaggagaagcgcccagcgaagtaggaagagccccttataaaaccatcagatcccgctatcatgagaacagcatgggagaaactgcccttatgattccattacctccacctggtctctcccttgacacgtggggattatggaggttatggggattacaatttaagatgagattgtggggtggggacacagccaagccataccaaaaactctgttttttgtttttgtttaatggaaatgatttagaactttattttctgatgtttctttttcataaaaccacgacaccaaaatctacttttcactgctccattcaactagtagagaatatctaatctcttctcaagtatttctttctcaattatggtggttttagctaagaacagcttatggcatgcttttctaaataatattagaacacataaattatctgtacctggtattaccacattcattgctcattttaagatctcaattgatacattcaattcatatatatttaaaattgattcatttagagcaagagatacaggcattttaatgtattacactgctactaaagcttagcaaattattcttttttgtgcccacaaattatcatccattcatgtcctaaaaataaaattgaatttattatactttcccatttatccaaaaaaaaggttttttttaacaattgatgcagatacacattttcaagctaaaaatatgtgtgaaagtggcctctttctcatagtatttattttaggagtctagcaataatttttcttaggttatcagcacatgtcttagcctgaattatttgaattcagtctgtgtcttcaagttcagatggttatgtgatcttgttaagatctcaaagtagtgggaatgatggagtatacaacaacctcattgttttttatggcaactgtcatttactgaaggacataaggctagcagaacatggtcagagaaggaatcaaagtttggtcagccaactctgctccacagctacaagctgctagacaggcataaatttttccaaacctacacaaagggacttagggcccttggctgagagcgacattctaaccacttccttatttatggctggtggggtttgtacattttctcatttctgtataacatttcttgactgtaataagcaatgtattcattctgctttaccactttcactaaccttaacctcaatatatactcaattaagcaattgaaaacagcagttttaatcttttgacataaatgatttcctccgaagcaaaatgctggaaatcccctcaaatgcaccttttattgatgaatacctataagcaccacctacagtcgctggaggctgacaggaaccaaacttgatgataaccactgagctgagaattttcaactcactctttttccctgtatggttcttctagctgcattatttcccactatttaaagctacagctggtgaactattcaaatatttaaactttggagaagaaaatatcaacttatcacaaccctctttttatattctaaattcatatacctgtttggtacttaaaggaaaaatatgctgaggaacaggctggtcataagactgtatagaacgtgcatcttccatcctattgaggtgactcctagacaatgggaaaaatgccttcactcgacttgctcattaaatgtgaccgtagctgctaatcttttggcgctgtctcgaactttaattagatgtgctcttctcttgaaggttggaactacagtatccagagaccatagaatcacagagttgaaaacaaaatcttggaaatcattgaatccacttatcagatgagaaaaaaaaaataagcccatggagatagccattttaaaacatatcattctatttagcctccaatgtaaaacaatgagttactatgtttcaataatgttgatgttaagaaattatttgatagcttcctcacttggtctcctatattcctccaaggttactagttaggaagactgtcattcaaatttggagactacataagaagcagaaaaagcatataaagaggcacatgaaattggaacttttctggtaaaatcttctttcttaaactctcctcaaataagctgttggtggcaggaggtgaaagacagcctccaccctttagcacagtccgtacttgtcagcatttcccaggaagggtgatgtctggaaatgatagagattgtggaagcacattgcattatgggtcaagaatgcgaaggtcaaggagtggagtcttcctttacgaagtagtgttaactgcttggcgtggcattgttgtaaacagaagccaccaggaaggatcatccttaggagggaacctgtagatatgactgaaaacaagagagatccagttttaccactctggaaacataggtaatagaaagcccaaaaggtaccttatcacttgtttgttcctttctgtacaaaaggacttaaatcctttctgagcaagaaagatatttgagaatccaattttgttttaaacttgagcttagcattttggaactattccaaagaccacagaattcacagtcattagcataccacagcagactcttttcaaatattgcaaaccagaacagtctgcttgaaaacctggaaatacgacctagtgggttcaacttgactttttttatttctaacccttacccctaggcaattattgataactcattctggtacctggtatgtatatggactttgttagaagaatttgacaactttctaatcatctgttttttttcttttgcttgatagacatacatttagtagaactttactggattgtattgattataaaccacatttcagttcatatcagtccattttgctgcacaataaacaaccaaaaaaatttaattcagtggctaataacaacaatattgatttattcatggagctgcagtttggtagggtttggccaatcatggctggaaatggtttagctatgcttatctctaggccgtcggttctgttcgggtctataccacatattttcttctgagactcaagctgaagggacatcagctactcggggtatgacagagtagcacaaggcaatgacagaagcacaaacaacacttttcaaaatctctcctcttgtcacatttgtttatagcccattagacaaaacatgtcttgtggccaagcccaaagtcaaggggtaggaaaatactttccacctatgtgaggccatggctggagcgtgaatgtatgatactactagggatgtgaaaggattgaggccaataattcaatcttctattggagacaagctcaacgagttagttaaaatggaaggctaatatttactaactttgcaacccaaggaagagaaagcaggatctctctgacgatgacggaatttcataccctcatctttgaagttatactaaagcttaggaacaaccgtcagataggactgaattgctcccccttccagattcagcatgtgaagtatgcagcatcttattatagcagtagccaaaacagccgttttcttcaatttgggaatacaatgtaggtgtgttaattttcaattaagagttctaaacttattatctgcttggtagctcttccatgtgacagtcattccatctgactcttcatgttggcttttgaactaaattttaaaggaaccgccaaaatttaagggccatgtactttttataacctgtttgtggtctgggtaagaaaataaaaattatacaactgttctttttgaccagccacaagcatgtaatgaaaatgactgttttggctagcagatgtattagaagctttcaaggtgtttaaaaaaaaaaaaaaaaactggagaaaggagccagtgaattgacctcaaacaaaacaagaacaaataaacaaaacacttgtctgcacttccaaggaagggtgatatctagaaaagatagagatgatggaagcaccttgcattatgggtcacaaacgtgaaggtcaaggggtggcgtcttcctttatgaagtagtattaactgcttggcagggcattgttgtaaaaagaatccaccagaagtgaaacaagcagcactaaaagttaaaagatttatgtgtaaacctcatctaaggcaacagaagccatttctataaaatagtataggaccttttattatatatggtcctagagtatattaaaataagtctgtttgggtccatttgcagctcatttgaagatttttataggaaaaacatcctcaaaaatatcatactacagtgccttgatgcttttttctttttataaggtactgccagcccaaatagtaagaaaccgatatgatttttgtccatgtgaggtgtttaattgcttcccaaaatatggttattgtgtagatgtcactaacgaaatatataaagagcagtatttgggaaaatttattttaataccacctttttccttttttaccctaaaagtatttatttttttcgtagcatacactctgtgtctcagtatcattgtttttcataaaaacataaattcttaacagaaaatttcctgcaagctcccctaagcttgaagagacaaaggagatttgtaatgtagctcagccccaatcagggtaaaagaatgcagggctgactttatacttataactcagaaaaaggttatgcttcccgtctcttcacagagctagtctcttaattgattccgaactaggaacatgtacaagtggcccacgatctggaacagactggcggataatggaatattgagaccttgtctatggtcagccatattaacactggataagtctgataacactgtgattacatatgtatcaatatagtatgctgttaatatattaaaaacttatttacaacatgattattggacaactgttacagtacagccacatcaatcctatatcaagttagaccatgtcaactggttttgtgttgagacacctgtgtatggacatagtctgaacttttcatagtttgtgctaaatgatagcaatcaacatcggtatggcacttacagtttactgataactttcatgcccattaacatagtaccgcaataactctgtgaagtgctgaatttgtgtcctgtttcatgattgtatttgtgttgatatctcagtcagtcagagtcccaacaagaaacagatggcacattcagattagggtaagttgaggagtctttatttacaaggcactacatactcaggattgggcagggtgtagggaaatctcacaagatagcacaagactctaggactagcagcagcagagctgtcacctctcctagacctgaagccgttgttggggagagaggtttctcagagcccagaaaaaaagaaaaaaaaaaaaaacatcatgcagattttaatgccttgggaggagcagtggctttctcttaaggacagaatttgcctcgaaatgatactcagggaaaaagagatgaagggaatcaatactctgacccaagactctcccttctctgcagtggtttgctagtcctctccttggtcaaacccaaacagaaaaccatagggcataggagtctaatgatgtaatccaagtcagccccctggaaggtggaaaaagaagggaaaatggatctggatctggagggataccaaaaaaaaaaaaaaaaaaaaaaaaccatagttggcatgcttgtttattgatattttcttgcatgatataagaatccagataaatatagtaagaggtctattttactaacaattttaggcacctaataataatactccttctttgaatgtataacctctagaattggttcagaaatgtaactgtgccgttacaatttctattagtattcaacagtagattcatatccattcatctatgactggagtatctgccatttgctggttagttactgtgtaaggtactttgtaaggtatagaaatacacttggggtgcgatggctcatgcctgtaatcccaaggatttgggaagctgaggcaggcagatcacttgagtccaggagtttgagatcagcctgggcaacatggtgaaaccccatctctacaaaaaatgcaaaaagagtacctgcgcatggtggcatgtgcctgtagtcccagctactcgggagcctgaggtagaaggatcacgtgaacccaggaagtcgaggctgcagtgagccataatggcacaactgcactccagcctggatgacagagtgagaccctatcaaaaaaaaataagaaataaatttgagctcagtgacctacattctagtgcagaaaaaaatgaccatagttgattatgagattttaaagcaataaaccacatgagacatactaatgagctcataagatcattcagaaattgtttattatgaacacatagtactttcagtgtggcattaaacagagatcactgtccttaaacaagttaaaagcagaatcaaatcatctgcaaattaacacaccactaaactttaagcttcttgagtgattctgtaatttttaaaatgtcttcagcatttcagtgtcaagatagtgcaaactcagtaaaagcttgtggaattgcattaaacaaaaccaaaataaatagattttattaaaactatatacaattgtctttctaatcatatcctctccatgaatagggaagaaataattttaggaatttaaatatcttctatcttaatagttcctcttatttccctcttaagcaatgttcactccttcaaaaatatttattgagcatctaatatgtacttaacactgtgccaggtgctgtgaagaatgccaaggaaatagaatgaacttctaattctttggagttccaattaaataacctaaagttaaattggtttcggagagaacattatgccttcgagactgtaggcttctcttgattagaaagtcttaaacattttaagtaactaaacagattaaggagaattcaaggatgcctctcactagtaaatttggattagtctggcaaacttcagaccttaaatgcaagatttttaataattaaaagaagagagaaaatgataattacatttctagagtctatgtttaccattcagccttcttaatcatttcctaagtatatctggtgatcaggattttataactccagaaaatctttctatacatcgcataaatctcttcttttaaaaagctcttcaattttgtattttgttaaaacttaaaagcctccatgaaaaatgagacaaaagtcagtgagaggctgtagcaataaaaatcagatgtgattttcttttgaataacatctgtttttacagtcctttcatgttaaactttataagaatttattataaacagctttattgacagttcaatcctatttctaaaaggatttattttcccccaatggtaagagttttcttttcttaaacctaactagttgcagatatttcagatactacatttctcattgtgtaaggtaaagtttctgaccacctgaatatgacttgtagctcctgagaacaatttgtttagtaccgatatcatgcagtgacattggtacaaaggaattttctttatttcactgtactgttttcagttttattctatagttgttaaataagaccattaaatatttttattagtcttatttcctgtttaactaggtgggtttttgatctctgttcagtaaagcattgtgctcttcagagcaagcaattgaaaagcaaatagtgagtatttctactgtaaaagtttaacattaaaagatatacacacagccaggcaaggtggctcacgactgtaatcccagcaatttgggaggctaaggcaggagaatcgcttgagcccaggagttcgagaccagtctgggaaccatagcaagactccgtctctaccaaaaaaattttttaaaaaatagttggatgtggtggaacacctctgtaatcccagctactcaggacgctgaggcaggaggattgcttgagcctgggaggtcaaggctgcaaggctgcagggagctgtgactatgctactgtactccagtctaggtgacagaatgagaccctctctctctcaattaaaaaaaaaaaaacaagatacacacacatatatttgcgtaggtaactctaatttcatttcaagtatgttatgtaacaaccatttgtgtagtgcttgtaacagtcaatatgtaaatactgactcatcttctttgacaattctacctagatacttattagagtcccccttagtcattgaaaggaaggttaaaatcaaaagacgttgtttgccaaagtaatgaaagaaaacttataaacacaatgtatcatgtctggggctgaactaaaacccttctgatatgtggtattaacagatcatctttcatgacagtaccagttattagaaataaaatgattggagttattattaatactaacaatagtggtattcttaaaatgacttccttatttatcttcacctttatacattctactactgcttcaagacccatcttgaattcttcttccacagaacattctgcattaatttcagccaacattgatttctctttttaaaatttgtcttgcacagtgaattagaaaaccaggaattggaaaaccagaaaagcttattaagtaagaagcagagaggagagagtttcaacaaagggccattctaaagtggtctactgcggacaccatactgattatagttggtgattaaatcttatctttccaactgattataaactcctccagggcatactcttatattccacaagatgcttatctgggtgcagagcatgcatgcagttggtatttgctgatttatcaactaactaaatcttaacatattattattaacaatttaaaataaagttaaatgtatcactctccacccctcaaagccatttctgttctttgttttcatagcaccattattatttcctgcatagtattttttaaaaaccgtatttttaaaatttatatatttgtttatttgggtatacttcactagattgtaagcgtcacaaaagcagaactattataaccccagccactaacacaatgcctaacaaatagtaggttctcaatatttgttgaatgaatgacctacagatattacttcattatgaaagattttgctaagttgttttacatctattttatccaaaactaaagttcttgaggcaaagcctagaatatcttctatgttctcacaatgctctgaatcagtgcttctcttaatatgcatagcaattgcctggagagcttgttaaaacatagattacttagccccaaccccagagatgctgattcagtaggtcccaggtgatgctgctgctgtcagtctctggcgcacactttgagtagtagggctctaggatgttatatgtacagacacatgctgaatagtgggctatgtgcttacttgctggctaaataataaatgttctcactgagtcatagaactttgaaatttgcaaggacttttgctattatctagtctatggatagcaaataacctgataccgtgctatagtgcttgactgcatttaacctgcagaatcctcatgagcagcccagcaccatcactccaagtgaaactactctcttcttgaggttgtccaattctatcaattaaagatgaaaaccaggttctgagagttgaaatctctggacttcaaaggtccaacagcccaggtcttctcaattctcgttagtgtttcagcagctgaatacaaatttattaagctgtatcagagtagtatctgtcaaattggagtgtccataatatgcttaaacagagaactccattccaataacatgaactttccttatgctttattcatcatcgcttgaaattttgaattttgcccaaagaagtttataccagtacatgttaaattacatcatagccttctttgtataaatcttagagtagtttactgaagtacatcgcaaagttttgttgtttcttaggtgattttaattatgtatgtttactttcagtaatgcatcttttctccttcatcaatattatgttatgctagctgtaagtacaaaataattgagaacaaattatgacaaattgaaccaagccacaaaaaaaggagaaaccaaatacttttgtgatttgagcttttttcagtccttgaaactttaagaatatctgtctttattaacttttgctttttgctgatggtttctctcattttattatagcttatagcattgtaaattaatttaacatgaaaggataaaaacgttgcttttgaaatgtttctcattaaattatgaaaaaatattacactaaataaaagaaaggaatgcctctggtaccagcttctgtttgctcaattattgcagtacccaaagtgaattattacacagttaactcagaggcaatattattgtcattatattataaaatagatgagttgcaatcttcaaaaaaaaaaaacagcataggtcctttgaaagtgaaataccttttttccttgtgcttcatttaaatatatactgaccccagttttgtttttgtttttcctttttagagttcttgctaatgatgggcccaaagttatattaagaactgcaaagtaaatttcaaccaattactttattcaggggagtcattaaattgaggtacctctgaaattttggaaggaatgtactgccaattagccgaaagcactactcaatgtcctttctatggttataatctctctagtgtatttttaattgaagacaacctctatagaggaggtgagaagttgctatttattggtacttgttaggatggaatcaagggtgtggaagatattcatctatttctctctccagctcccccacacaaaaagaatggtgcttaatccatctgaagcatttggggagcgagggtaaagatgtaatatttaccatgagccgaaacagatcttcagaagtggaaaatggaagcatattgaagtccctcaactaaacagactttcttccatatggaattcaatgcattaatgttttcaaattctatagcttcaaattcttaatattttcaaattatgtgagcttatgtcaaaacatttaagtgagcttttaacaatgaggcaaatatttgaatcatttgtctacataacaaatactactataaagcatattaaatgttataaaaatcctaatatactaatgtaagctattataaagtacaaataattaaacaatatttatatgatcaatgttttataatacgataaacacattaaataattaaaaactcttccaccgtgcaaaaatgactaaataaattgttaatttctaaggctttttgagattactgtgaaagggggtatagtttcaggaaaggtgaaacttcccttcaatgtgtaaaccattaaagaacataataacctactgagtgtgggtctcaatgatatgccctggaaagtatgggcaactactccacacccaattttgtctttatatgataaggcacagcaaataattataatgcaatggataaatggtaaatcccaccaaagattaaccaatcagagcaggatgaaaattctgagtttggaaatctattggaagatttacagattagattaaagtgcccagtaaccaaactatcaaaattatatggcttcagttaattaatgatttccaaggtttttagtatactgtattacaaaacacattaagcatcttaagcattcaaacaacatttttttgatgattcagaaagcatcacaaattgttatatcagctgataataacttaggtacatatcaattaaacttgtattatagacacgcagaattcttcagaccagaagtcgaaagggcttctctagtttgtttatgctaagttgtttagagatgacataactctgagctaatttgtctattgcaatggttctcaaaatggggggcgggggatatttttacctccaccaagtggacatttagcaatatctggaggcatttttaattattattactggattggagatacaactgaagtctagtgggtagaggccagatatggtataaaatatcctacaatgcataggatagccctccacaaggaattatttaggccaaaatgtcagtagtataaaaattgagaaatgctagtctaatatagtgtttactcacctttcctgaaactatgtcccctttcacagtaatctcaaaaagctttagaaattaaaaaatcgtttagtcatttttgcatggtggaagagcttttaattatttagtgtgttttatcttatgaaatgttgataatataaatattgtttaattatttgaactttataagagcttatattagtatattaattaggattttatttaacatttaatatgctttacaataatattcattatatagacaaacgttttatttttttcactttaacaatgatttttaactctaattacataagaaaaagtatgagttaacaattttttaaattacatgcttggtttgagggccaaatacacatgaaaatgtggactaaaatttaaaatcaaataaaatctataaagtcgaggaaaaagctacttttatgacgaggcatggggaattcttcatagtttttgggttttatcagaagttagctattttttttctttttgctctgtaaacaatcagataagagaggctcaaatgacattttcaagtacatcttaacaaaatacactttgagcatcaattgagtaaagtttcattcttttgaaactttggttttcacaagatttcctgagagttttattttattggtgttctgtgggacttgggcatcataattcttacaaactactcagctcaatctaatgtgcagcgaagctctgggaacttttgttttgtctagtatccagttggaagattctatagctacagagcttgggtttaaaccccctccaagtctttaccagctacctttatgaccctggcaaattacttaaactgtgtgccaccattttctcctctgtaatacggaggcaataaaaatttccacttttagattttctatatgcggtttacaaattgacttactctgaagatcatctggagtaaaatctggagaaatatgatcccttataacttcttcaaccctttatatatttcaacatgagtaaccaatgctctaaatatggatataaattataagaataaaaaatctaggactattataatggtctaaactctcttcatagctaaaagtgttgagtaattaaaccagttgagcagctaaatcatgtacacacttctttgatccctcccacgatcatgtatttggcattgtaatgaaaagatatgtttattttcgagaatagacataactacctttaataatatgatcacccagaaatttttacaaacccctggaaaatttcatgaatatcaggctgtgctcataaaaccttagagatgagatcacaatagactgggtcaacatatagtaatgagcaggattaataaaacctcagatgggcatttacaaatgagtcaaaaccatgagtataattaaataattgtagcaaaaaaagagccttgggtaatcctttcagcaaacgtaatcgaagtgattgcatttagaagacaaatatttaatttggtgactagaaggtcttttattattccattatgtctttgtgtgtgtgtgtgtgtgagacacttttcaaggtcaatttttacttataaattgtctctaattaaaaattgacttggttattaaatcattgaaaattggccatcatcaaattcctcattaaaatatttctatgtgccatatatatatatatatatatatagaatatatatgtagaatatatgtatacatttatttttactttttttttactgtgcctactagagaaatttaaactacatatatgtagaatatatgtatgttttaactagacatactgttaagtacactatacctaatatttggcaatattaataccatctcattgagaaacctggaatatatgcacattttggatgtctattatatgttgggcactggactagtcattgataatacagagattagtaagactcaggttgacttcagccatgttgtcaggaagcacacactctagtttgggacagcgaggagaaattcaataagagaaatatatataaggcataatgctctaggagaatatgcagtggataactgcccaataggaccaggcaaggctttttagaggaggaggtggcatttgagtcaagtgttaaaggctgaatggaaattcactggttgagataaactccttaggaggaactactttaatagaacttgccgttagtcctgaaataaatggtgtgcaaaatcattaccatctgtcaattcactcagtctactttgctcttaacttcagaaaaaaatcagaaatacaattaaaacatttgagcctattttactgtcttttaaaatgagttaattcaaagaggaaattaaatataatgagagagaatctcccccgaggattgggggctggggaaatgctattgattctttgcttgtgtttattttctctcaaaaatacattatgcataaacttgatgatcaaaaattcagattattacatttctaaattggcaatgcaatttattgcatcatacatcaatcacaaaaatgctcatcttgctgactttcataaacttctaaatgaacaaaaatgcaaaaatagtttatactatattacactatagtagatttgttaaactaaaccagaacaatggtccatgaaaaataggcctctgactccaaacgctcacaccacaggatctctctgagatttttgtgtcatttcaagtcagagaaaattgtctaataaattgttggcttgtaacaatgaaaactaagatatctgtggggctattcttgttctcttcattttactacagcagctctgcccagtagaaataaaatgtgagccacatatgtaatttaaatttctctagtaggcacactgaaaaaataaaaataaagaagtgaaattaatttcaacagtatgttgtatataacccaatatacccaaaacattgtcattttaacatgtaattgttacaaaagttattaattagattttttccgttaagtatttaaaatctggtaagttttactcttacagcgcaactcagttcagatcagccacatttcaagtgctcagtagccatatgtgtctagtggttaccatattagaaagtagtttgagagatccacattaaaccaaaaggaaaagaacttccggcccttcactgatgagtcactcttcactgctaaccttggaagcattcccaaatgtagtctacagagtttaaatagtctatcttaacatctctcagggcttcagtcttaatgccatagtatttttaaagaatggtggatattcttttttacagaacactctgtaagagcaattagaagtttatgatgcacgtaatgcaaaatacaggtcatttcccaagcctattttaaaagcgcaaaaactgtagtcatttatcacccctgagaatgttgtcttaaatgtcttggtttggatattggtgatgtgagaactttgtgataagaaagtagtctttaagaataagatatcagactaaaattcatatctagaatgaaagtcttgtttttaatggaagattaagagcaagtctgattcagatcatgcatggggtacactagtctaggaaaacactagtctgaaaatatactaaaagttacttcgcaacttaacaagaaaatgtcttgtgggtgatgtcgttcttgatttttaggcaaacctacctacctttgcaaagcagctgggacctttttgcattggaagaatcatttggagcacaaacaaaattagattatcaacactttggaaaacaactacgaatgagcaatcagaaacctgaccttaagattacttgtgaattgtgaatcagcaaaataaactcgattgttcattgctaagtgtatttcaattatcaagggccttctagattataagtagtcttttttttttacttagtttacaattaagatgtgtggtatttgaaatacatttgccacagggagaaatataaattataattaatttcctaggctaattcaatttatgacatacctatatacattatctgtcatctataatttttcccttattgtttacttcccactggaagaatgaaaatggaatattattacatggcacatggcttgatacttttacaaactctgacaattatgtatttattttgggaggcattgagtttatttgttttatttatataaatttatgaggtacaagtataattttgttacatgcatagattgtgtaatggtcacgtcaggccttttagggtatccatcaccttaataagatgcattgtacccattaagtaatttctcactctcataaaattctaattatgtgaatttaatttaatctatttaatgtgttttaggcaaatatagccggtactataaacagttgattttaagatatcattgcttacattgagactaagtaaaacaaaatgggtcaataaatgtcaatctagataacaatgtcaactaaataagaggtcaaacatggcagtatttttgaaggtgatctgtgaaagtgattatagcgtttacactcatggaaaatgccttcagagtttcaactaagaatgccaacagctcattcctttatcctgatgcatattgtcttccttctcacccccagttccttcttcccctaacccctacccgctttcctttgctgattttgacagaaataggacccccaataagtcagggagatagcaggaaatgggataggatagaacccggaatgatagaatagctgagcctgaaggcatgaagaaaggctcctcctgacatctaaatggagacctaagagatgggttggtcaggtagggggaaggaaacatgaggagtattctctaagccaggcaacatactgtgcacaagtctgaagtcatgggaaagtgattttgagaggattgctgcttggtaaacctagagtttgaattgggagagatgaagctagaaagttagtaagggtcagattttttttttttttacttgcatgacaatggtaaaaaccactaaaggttctgtgttaagcagaggagtgacttcatttaaaaaggtaaattggattgaaatgaagggcataaactgaggcaaaaatatccttcgttaagttattgaagcccagttgaacacactggtggcttaaactggagtattggtataagtgggggaaagaggttaatagattccaagttgaaaaaaaaaaaaaaaaacatagactttgctatctagtaatggattaatatacaaaaggaaaaagtaaagtttctactttttggacagctagaaaccttcaccgaagtagggaacccaagacttagattatgttgggaggggcagggtattttagttgcacagggatttgctttacagaaatgactgaatgacaatatagagagatcaattccattaaaagaagtttgattactcacagttctcaagggaagagtacatactacgccatgcaaagccatgcaggaaaaaagttccagagtcggtcagcaggcagaaaaggaaagcacagcccaaaccctttattgtggtttccaaggaaaagaaatgagtgaggtagaataggcaagtctgagcaagtttaggactggatagttcaaataatttccaaaatttcctggctgtaaaagtggtctctggttgtctggtaccaagccctagggtgaggggaaaaagttagggtgggggaaatattggtttggtgtaacaacagttagatgaagaaggtagttggggatacggactttggattagttggtttgtataacgaaaagcaatccaacaaatccacaagggagcaagtttacaagttatttgctatctttaggaattagctagccctgggaggggcagtctctccctggccttccaaggacctcaagatgttcaagcatccataaaatatggaaattttttaaaaacattataaatacacagagtaaacgctgggcatgatataggacagtggttctcaaactttagctccactggaatctcctggaaaacttgttaatatgcagatgaccgttttacccttaagcttctaattggggaggtctggggagggcacagataatttgcatttctacaaagttcttccatgattttgatgccgctggtgagggaccaggctttgagaacactgatttaggacgtgtcctgtttagggaatatccaaaaggcggacaagttcagggaatattcttgggcagttggctgtgtgagtctgaaattcaggatagaatattaagctgaaataaagatttgggagcttatctacagtcaaatgataattgaaatactgagagtacggggggagagaggtccatgtaccaagaaaagtgaaaatgactaatcccaagcctcgctgaccattgagaatggagctaagtgagaggagttaacaaagctgacccagaaaaagtcataagggccttaggaggccaaggaaaaaaaatacattcactgccaacgagaggcacttacgaatggcttgactggctttgccagcatgcatgaactgcttcataattatttgtattgattacagtaacagatacatattttaacaagcaacttaagtaatacaactgatttttaattatcttgtttaaattgataaaggttgtatatattcatggtgtacaacatgatgttttgatatacccatacattgtggaatggctaaatcaagccaattatcgtatgcattacctcacatacactttatttgtggtgagaacacttagagtatactcttagcaagtatcaagtatataatacattgctgttaactatagtatccatgttgtacaataggtctcttgaacatactcctcctgtctaattgaaattgtgtttccttcgaacaactgatttttttaaataaaaaacttaatacctgtaagttagaattcttaatggtcaccttaggagcctatacaattattcctacgttgttgttactattctgtgtctttttcttttttaacatctttaaaggtatcaaatttttatattttgaaagtagaatttattttttgtcagtctaaaatatttttatgttgaacaaaatgcatgaatggtaaacctagatgcaatcaatttttcaaataaaaaaagtagatacccatgaacatttcttttgtaattgcaaactgtcttgaaaggcagtttcaaaaagagtttagttcctaaattgtaccattactcactgcgttaaaatgcaacattcatttgagcgtataaccttttgatcaatttgtttttgatgtcttgttccctgagagttgtctcaaatagatacatataaatatacacatatctcagattggctctgagaaatgtcttgattcaaacgttcttgattctaagattcatggtacataggaactgtatggtgacaaccttgtcagcctatctttagagtagctttggattctattcagaacatttcccaaagctattctgctatcaagaatataaacaggaatagtcaagggaagctttttaaagggcaacattttcatgtaggcatttttctcacattgaaaactagtttactaaatgcagtgtattaccttctcattacaagaagtctttcacattagtataaatgcatatggcagttgtgccagaaataaattgcctctcaaactagcacatggaaagaagaattctgagatttagcacatatgtagcttttaaatagtatactctgtttcaaacattatgtgttagtccacgttctcttcagccattttcagttgcatttttactttatattcctttgtatatttatctttgctaatcattgtcctgagattcctttagctcttgaattctacgtttttaattaatagaaaactttctttttatttttcccccgacatagttgttttctagaaagaaacagttataggttataaatccaacactttagggccgacttgaacatgcatcaaagctactagaggacttgtagaaatacagattgaatggtcccatgcctagagttttacattcagttacagatagggtaggacctgagaattcacattgctcacaaatttccagttgattttgatggcattggtctagagaccaaaccctgagaaccattaaaaaacaaacaaacaaaaacaaacaaaccaaaaaaaaaactatatacagagattttcttcattggcttttgccactgaagacatttagatgaagagactccacaaagtgtaatcatttagttatgagaggggcctgataatttgcatttctatcaaattcccaggggatactattgttgctgattgagaaccacacttggtgaaacactaattaaaataccattaaaaagcaaaaacaatttaggccagcaaaacctcctaaagaatgaggcctaaagacttattttgttttatttttgccagaagcttcttatgggcaaaattatcaccaacagagctgaggttcaaacttgtgttcatagcaagcaaaagggataatttggaaaaaaagctgaggttagctttgtggttggtttgggagtgggaatgagtagggaggaagaaatttaaaaaaaaaaaaaaaaggaagaagccaaatattaaattgttcacagggcgaaaaaagagaaaaggagtaactagaaatatcttagactggttcggcaagtcgggtccctcgcagctaacagtggtcccaccctctggagtttatatgtttacattctttttttttttttttttttttttgagacagggtctcactctgttgcctaggctggagtgcaatggtatgatcacagctcactgcaacctccacctcctgggctcgggtgatccccccaacctcagcctcccaagtagcagagactacaggcaagtgccaccatgtccagctaattttttgtatttttttgcagagatggggtttcaccagttgcctaggctggtctcaatctcctaggctcaagtgatctgcccacctcagcctcccaaagtgctgggattacaggtgtgagccaccgcgcctcattggagtttgcattctagttgggaaaatagccaataaatttgtgacttattttcctttaaaaaaaaaacttattctggctattgtgtgactataggatatggaaggtgcaagagtatgaggctaacaccctgttctaaattccgtctcctctgagccttgttctgtcaagaatctcctccttctatactttttaagtcaccttcctactgatcctttgctgtcagcttaccactctggtacccttcattttaacaaacaaacaattgtccaagcttaccggtgctgctccttcacccctccacctgtacctagtgtcaattctctccctcttctgatggccaaactttgtgaaactgtagcacagctccatatgtgttcctgcaaaggacatgatctcattcctttttatggctgcagagtattccacagtgtatatgtaccacattttctttatccagtctatcactgatgggcatttgggttgattccatgtctttgctattgtgaatagtgctgcagtgaacatacgtgtgcatgtatctttaaaatagaatggtttatattcctttgggtatataaccaataatgggattgctgggtcaaatggtatttctggttctagatctttgaggagctggaagccattatcctcagcaaactaacacaggaacagaaaagcaaatatcacatgttctcacttaaaagtgggagctgaacaatgagaacacatggactcatggaggggaacaacacacactgaggcctgtcggggggtggggcgaggggagggagagcattgggaaaaatagctaatgcatgctgggcttaatatctaggtgatgggcaatagcaaagacttggaaccaacccaaatgtccaacaatgatagactggattgagaaaatgtggcacatatacaccatggaatactatgcagccataaaaaaggatgagttcatgtcctttgtagggacatggatgaagctggaaaccatcattctcagcaaactatggcaaggacaaaaaaccaaacaccacatgttctcactcacaggtgggaattgaacaatgagaacacatggacacaggaaggggaacatcacacaccagggcctgttgtggggtcgggggaggggggagggatagcatttggagatacacctaatgttaactgacgagttactgggtgcagcacaccaacatggcacatgtatacatatgtaactaaccttcacgttgtgcatatggaccctaaaacttaaagtataataataaaatatatatatatatatctctaggtgatgggttaataggtgcagcaaaccaccatggcacatgtttacctatgtaacaaacctgcacatcctgcacatgtaccacggaacttaaaataaaaattaatcatagaactttaaaaaaagaaaagaaaatgtagcagagctgcctagctcaccttctttacccacagctcacttttcagtccatttatctggctattactcctaccgtgccaggcaaactgctctcactaagaaaatcaatagcctaccccctgccaaattgcctgactcagcttctccttgtaattttctcctttagttctctaacaccctcttccccaggttttcacctgacctgtctccataggacatttgagtctctttcctgatgattcatcctcagcctcttccataataagtatggctgctccccagatcctaccctcagcacttcttcactttccatgccacatctcttctgtgatctcatcttcatccacggctctaattagtatctataagcagatgactctcaaagcatatgctgcctatgtacccctcttggccattctacattgacatctgcaactccccagtgaacttctatatttagaccacaggactggtacctgctgataagcacaggtagggtgtactgagtagtgttttctctatttggttgggcttttgctaaagcagttgtcaaatattttgagtcttactcatggccacagacattttaacattagcatgtcccaaactgaaatcccctactgcctctattctctatttcagaagatggcaccaccatctacccaattatttaagctagaaacttctgattctggtgagacttctctcttttatgcatatgtctacactgacacaaaagactgcaaattttacctcctaagtctgtcttaaagcagatttttctctatgattctctatggtttcaggcccttatcactgtgaagtcaagcatacctgattcgaatcttgtcaccgttggcaaatttttaaatctcttctagcctcagtttcctcataaagttttctgtttcttagggtgactaaagggcttaaatgagattaccatacagagagtaaggtacataaaatgcaattaataaagaatagtcactataactgctgatgatgatgctattactattcgtatcctagaaaactccggtaacttgttcactggtctttctgcatctagcatcacttcctcagccagagttatcttctgacatgaaggctgatgccgtcacccccatactcatgtttgaaattcttcaatacctttaagataaattcccacctccttggtgtagcatgcaaggtcacacatgacataatctctccaaggccccatttcttccactctccttgagtgatatatgtggcagaaaatttaaggctgcctggatattatccaccttacgtcccaatacttccatctgccgcaaagaccttctacccaacttcccatcctcaacgaattcttattctttctttaaaaataacctcaaacttcagactagacctctggtccatagggcattacaaatctctcagtaagttgtacaggatgaacacgccccctaaaactttgtttcagatatttcaatttttattttattttattattattatactttaagttttagggtacatgtgcacaatgtgcaggttagttacatatgtatacatgtgccagatatttcagtgttaaaggtttaataatcacatttacagaaaaggaattagctacaaaatggtggcactggtatacaagtatgtaaagatacagtgcttacaatttaggattattgttgtcgatgttttaatattaaaatggctaatcatacagcaaagtcgaaagaaatttacggtcaacatctgtatacccagcacctatactttgccattgaaattttactatacttgatttattacatattcatctatccatccctctttctgtgatcaatttttaatattctaatactcttacccttaaataataagttatcttttcaaaaaataatgtgtttttacatagatgaagcaaaataaacttgcccttgataaaacaatatgcactgtagtgccttctaattcagtgcattgaagtatccattaacaatataaccagagaatataaaacatgtttattaatattccactgtacctgattagatatagaccattaggaagagttattataattaagaatctaggtttgtcaatatagaaaaaaacctgtgttttttatcccactggaatgtcttgtgaggaatattgttcccctttttctaaaatttaactttgacctttattttgttaatgcaccatgggttaagccacactacgacatgtgctaaatagacctggaagttttcaaactaggtttttaaagtgtatttgacattaaatcttcataacaccttattgattaatttaaatccattaccatggtaaggaaaattcgcagacaggcaggtgaaaattaaaatagaaacaaaacaacatggtaagcaatccttccccccaagccaatcagcatgtagtcagtgtgtccttttaaattagcaaggcgcagcttcccataaagtcccagcttgattttatatgctgcaatagtattgctaaaataaaggagaaggcaacttttctctataatttttttctagaagttttcacgcagcttagtatactgcaatgaccacattactcagttccagaattagcagcattccattgtgaatgacttaattcacattgtgattactcatttaacaacattcttgagggtttacaatgtgcaaagcattacattaagtcgtgtgtggcagaggttctcaaatgcagatgatctgtgaagaagatttcctcaataagcagagaaatgagaactataaggacagaaagagagagagagagaaagagaaattatttaagcttgtagcttgtcatcctcctttcttaggacagcctaccatttaggctgagactatgtctttctgattatttcttgtggttgaaataccccttccttaacaatatgatggtaacagtggatggtaaatcttgttttgttttaatagtttacctggcaaaagtatcattttatgtctgtatcagttatatataatagtatatcagtccattaccaaaccgcctcaaaactcagtagcttaaaacagtaggtacttcttgagttcactaatttgtgggctgatggtttacattgggtagtttatctgctctgactgggctcccttgggaatctggagggtagctgagagcttaagtgtctgaaagtggctgggtcaacacagctctatcgctcacatcttgaacatccctccagcaggctaaccagcccgagcaagtcctttttgtgaaggctgaggtgaagagtggaagtgcaaacatgtaaacaatttgttgagcccctgcttccattaagcctgcaatatccgattggctaaagcaagttttatttccccctgtggtaggcagaatcatgggcccctcgaagatgttaatccccagaacctgtgaatatgctgtgctccctggcagtagggaattaatattccagacggaattaaggttgctaagcaggtgactttgagatggggagattttatggactattcagatgggcctaatctaaccacagggttcatataagtgaaaatggaagcaggagagtgggagtcagagagatgaagatagcccctgctggctttgaagatagagaaaggggccattagccaaacaatgttggtagcatctaatgctggaaaaggcagggaaatagattgtcctctaagcttcttcagaaggagtatagccctgccaacactttcattttaatccatgaaacccatttcaaacttctgacttccaaaactataagataatcaatttgtgttgttttaggccagtaagtttatggaaaattgtcacagaagcaataggaaacaaatatacgctccattgttcaatcttttgaataacacatatactattatttacttaatgtttttcttaaaatcagctcattttgttttctgcttttagccttaagtgataattcccacaaaactgtagtctgatgttgcagtgtttttttccttaatacagataaaactaaatgaatattaaaatttaaactataagctgtttatctgtgtaacatggtaaattggctccctaccactactgttcagcaaaccacattttgggaaacagcgatttaggtggttcaaaggagcaagtgattgtgcaagaacaagaatttattagagaaagaagcatttggccaatgggtagaattgttggcagacaaaggtagaagagaaagacaaattattcagtatggctctagcgaactctttgcacttttatcacacaatctgaagcttgctaatcttgacatgtcttaatgttgttggattgctcattaaactggctgaaatgttcacaaagactctcacctgtcttctggcttaagctgagatttatcacacttcttggaaacatcttctggtctccagatctccctcagctaagctatacagtcagtctgttctgtaagaaagcccaaacttctctgcagtgttcctcagtctttttgatatcatgatgaacagattaagttgatgtgttcatcatgatatcaggtaagctggccgaagactctaagctgcctaaccatcccagggctgagagggatcgatatctgaagtacctataacccaatcagggcatgtgccttagcatacccattggaaagccctgttttagagcctttatcagctgtgaacttattgaaggcaatgattttgtcctgttaatcattctattcataattttcaacaagatacgtggttgttgttaataataattgttggttgaaatgaagttaaataaatagcaattgacttttccaaggtgacgcattgcacagatttatttatcttccctttgctgccctggagtaccagttgtatctaccaataagcttcatttataggccagcctcatcttagtttctgaattagtctaagtggctctggtagcgcatcaaaaatcttgctttctgatggtctttgtaatttgaattctgtgacttacagacttggtattcaatatgtcaggaataaacctggggtgtgcccaaatggtttgaaaaatcccagccttcctgatttcctctcttctctttctcccctggccaccctaatagtctgatagtttttgttatttggatactcctaaactcttggcaatttttcttacatctgttctctacaggctgtcacaagtgagtggaggcaggatggcatgggctgcagtggaaagaccaagaaaataagttaaaagccctgggttccagtaaatgctctgtagtgggatttagggcaagtctcttaacttctctcagcatcaatctccgcatctgtgaaataagattaatgacacctgtcttgcctatacttcaaggttgttttgaggttcacatgcattttccaccccatatagcctataaatctctgatgcctacagataacctataatgttctccagtaagtttaatatttccaggattttaaaactcaatgactagcactgctctgatctaacataacatattgtgtcaatatgtgtgggagtctctctggttgatgttaatggaagtttgtatagtttacctaaaatagaataaagctataatattaatatatatcatcgatgtgttttaggtgatttttttcaatataaaggcaattttggttcaaaattaggtagaacatttaatttttactaatttacaaataaaatgataacatcaaaagggccccttcttttaaagataagttgtaactctcacattgatagtaatctgtcatttaggacagggaatccatgtagtttgaaaattcattggcatcatggagctaaaacagtggctttttaaacatgtcgatttcagttttctttgttttacaagtcaagtagtgatattactgggtacatatgaagcatactgattgaccaaaaaatagtaacaaattttgtaaacccttcacttaaccattattcacctttcccagccacataagaatcctttctctttgtccttagattaattgcctttctttaaccttttcaattctaagtccagacaagctgctgtggttctttaaaaggccacacaaaataagtattgtccagtgctaacactctgaaatgtgatattgtaattactaccaagtgaacattaatcactactagattagaatggaattacctgttatattcacattaatagcaaatgagctttccctgattgatgttgttataatgaatacaaaaggaattaatagtgatctggcactcaccaaaagaggggtagtcattaaggacatgccatcaaaaggcgggtaatactttacaaaaaacaagtattaattaaagtaatatcacaacgaatgcctattgaataacttatatccacattacaaagatattatatggttgcgattaatgtgattgcaatacattttgtaaaaattaataatgactaaccctttaaaatatttaggaagcagatatttgtttatatttgctaaatagctatgccaactctttagcttttgtgagtgacttctagcataggaacagtgatggataatatgaagcactatatataataactcatcggccgggcgcggtggctcacgcctgtaatcccagcactttgggaggccgaggcgggcggatcacgaggtcaggagatcgacaccatcctggctaacacggtgaaaccctgtctctactaaaaacacaaaaaattagccgggcgtggtggtgggcgcctgtagtcccactactcaggaggcagagcttgcagtgagccaagattgcaccactgcactccagcctgggtgacagagtgagactctgtcaaaaaaaaacaacctcatatatttttacttgaaaacatacattttgcctttaggatttttacttgttagaatatcctaaaggacctataattgtaaatgtaaaattgactaatttctgggttttaaaaaaaagtatttgaaagctgatctgctgtgaacattgaaccagatgttaagaaaaatgctagtaagaaatgagacttgggagcaaagaagcagaactaaacttttcatatatggtttctatggagtaattgagaacgtacatattaacagggatacaaagtcaggccctctcattcaagatgctttctgtctttaaaaaaaaaaaaaagtaatttttgaaattttctgtggcaacagtcccatagcagaaagcaaagagttttgaattaagtgatcagaatatcattcttataattttactacactgaacattatttagaaaattttgaatgatattaaaaccgctataaaacatacttgcctaccataagacttaggatttaagccagattaaaataaatatttatttagaaggatgtatgtaagaactggtgaaatataaatgaggtctgtatttgagttaatagtattgtgccaatgtcagtttcctagctttgatgataatgtactatgggtatttaaaatgctatcattgggagaagctgggtaaaaggtgcgtgagaagtctctgtactatatttgcaagttttgtggtcttaaaccatttcaaagtaaagttattttagaaaatatctaaatatatattttagaaagtattatctttttctctgtaactagtggctaattagctcagtctgaaagagtatgtagaggtggaactgctaaatatatttctgatctagacttacttgatgatgcttgaattagtaagtgaatgttatgtgccaacatatgctatgatacatataaatatataagattaaatgataggagctaattatttcttggcatgttgcagtgggtccatttaaaactgtttatgtaggaaactactgtaattataaaaatgagcacagcccaacagcccagtatattagttgaaatataaaaggcgttgtgtccaagatttgaaatgccttacaataagcttggcacttacttaccttcacacaaagcagacacattttattgtgattttagtgttccatattatatggtacagtaccaaaggaaaactctaaaatatgtactcaaaatcctgatgtgcccttctttccaaacaggtggcaccacaatgaatataacctttagagttaatatctgaggacaaacccagcagttacaccagcatgatttaggtcctgctgttacaattattattattgtatttatttcacaattaagttgcagagttgagctcgatatagttccagctgtggcttttttttcaactgtctcaatagttcatagatatggccaaatgttcaataatagtgaaagcttatagtccacatattatttctgtagcaccaattttatgtgaaaaaatgatttatctaaatctcagagaatttccataactagttttgttatacatctacaaaactaagttaaaagaacagagcagactttttaaatagctagattggccaaatccacctcattatcatcaagaagatactgaaacaccgtgtttatacaacaagaccaggcattgtaaaagaggaggaaaggtagagacaaaatttatttagccctcaggaatctttcattctgatagtgtaaatttgacaactttagagggacttattaacatgtatcttatatatcttgataccgaatatatattttgtgattgcattagagccatgaaatattacacaggtcatttgaacatagcattttcatagagaaggtgacatttgcaaaagattaggagaaaagtaactacgattagaaaatcgtagttttattttgtctcttgagaatgaattgatgttaattttatgtctgatttggccaaatacgatgtggaatttgctaaagactgaaaaaagaagagacatcaaatagagggttgcaagttaacagaccatgttataattaaatgagggaaaaaaaagtagagttgttaaactcccagagaagtcatttccccttggtttggtgcatttcactttggtggtgaagtaaatgaccatatgggcacttttctagctctgtccgcaggtagcactgggtatttgtggacaaattacctagcttttcatagcactagtttccttgttgatagacttcagaattctaaattccattttacatccttatttctatgtttaacttaaagataatcctttgcagccgggcacagtggctcacacctgtaatcccagcactttgggaggccgaggcaggcggatcacgaggtcaggagatcgagaccatcctggctaacatggtgaaaccccatctctactgaaaatacaaaaaatcagccgggtgttgtggtgggcgcctgtggtcccagctactcaggaggctgaggcaggaggatggcatgaatccgggaggtggagcttgcggtgagccgagatcgagtcactgcactccagcccgggcaacagagccagactctgcctcaaaaaaaaaaaaaaacaaaaaaaaaaacaaacagatcatcctttgcactggaattatcctgcagtggaggatagtaatgaaagtgtagactctgtttctgaacactagctatgtcactttcaaactgtgtgattttccttcaagtttctcaatcactccaggtctggtttctaaatagaggaataggagtagagattaatattgtgaagattaaatgagaaaacttatataaagcacttagtacggtgccctgcatattgtgaaggcttggtatgttgttagtagattcattttattatcattattaataatactgaaccctggctgttgggggaattggttctatcctcctgtctcatagtcaaaataggttaaagggccttctatctcttatttctggtggtgcattataattactaatagtaatgtgcttcatttgtatatgatcctttatagtttacatggcgctgttttatgtaatcttactaaaatttcaaaaataattttaaaaagccagaattcacaagaatgtgactcggagaagaagtagatgtttttctaagtagatctttcagtttaactgattcaaattttctcatgtttcatatacatgattatcatgtcttttgataaacagaatgttaaccagagtacaaccttgtatgaacatatttattcagcttagaaaagatccagaggtacaaaatctagatcccagtgtagaagttagcatacacagtacaatttctagtatgtccataaacaatatgttaaagtattagtttgagccatataggattgccaatatctgagtgttatagagctacaaaattagtaggaaattttgttgctttaacctaatcattaaattagaattgtgtgacttaaagttacaaatggtttccgaatattttgcagtaaaaaagtagtgaggaaaataaatataaatactaaactagacctgggaaatttaaggctataaagaattctagcttacagagagaggagtctttgtttgcaacctcccactagctaaatttaaattatcacaaatttcatcctctcctttacttaacccttgactcatgcaactagtcaaatgtctttttcttgctaattttttctttccatagatcacttatagggagttctggttaaaaatgatgtctctttaaccttcactaaaatgagaataggggaattaaaatgatatttaccacaaagagaaaaaaatctgggaggaaaaacaataaaataaaaaagataaaaaatttaggaatatgcagagaatggaggagttagcatatcttggaaacctgaattccaagtacttagaacttgggaagtcctagaaatgtgaagcaccagctactgcagaaggcagagatgaatgtgaggtaagatagtgagactgtgaagagaaatcattcagtaaaaaatgcattatcaagccaactgccactggtctagtggagtttaatcccactggggaaattctaaatggattgaagacatgtgtttaagagttagttattctttcaaaggggcaagggagctggggtatttatacacaaaatcctgctagtcattggtttaggactgcttccaacgggggaattattttcctagcatttctggcataccaccttggcaagaaaaattattttgtgtccagagtatgtctaaagccattagggaaaaaaaatgtggatcctcatagttgaaagccaggccagtctgcactaaagtggtaaggatgttttcttttagagatacaggtctaagaaagaaatctgaaggtggttacctcttatgcaagaatttaatttgatggattcaaggtgtgttggttaagagaaatggggaagggttgcttctcatgactgcggcacgattctactatactaaatttttcttttattaagcagcattgccttatgcaatgataggaaacatttgttatatgtgaaatcacttttatttttattttttaatctattcctattcttttcatttttttaacttttattttaggtttgtggggtacatgtgaaggtttattacataggcaaaccggtgtcacaggggtccgttttacattttatttcaccaccgaggtattaagccaactactcagtagttatcttttctgctcctctctctcctcccggcatctcttttaaaagaaaataatttttagcaattctttagaataagtcttggccacctaaaggtttccaggactctagttcagggagtatttatctaagtcagtagttcttaacctgatataatttcatccccagagaacatttgacagtatctcaagaaattcttggttgtcacattgggggcggggatactgctgtcatcaagtgggcagaggccagggatgctgctcaacatgttgtaatgcacaagacagccccccacaacaaagaattatttggtccaatatgtcagtagtgccaagtttcagacatcctgctctaaatcaggactgtgatgtgaattctctgcgatgatgaagatattttatatccgtgatgtgcagtactgtagcatatggctactgagcaattgaaatatagctagtgtgactgtacaccaggtgtgatgttccataccgaggaaagaagtagaaataagatatagtctttgaagtcagagctcacaatctagtagcggagacagatttttaaaaattacaatattttaaaaatattgcaatagaacatggtaatgttagaagattaataacatgctaaatttgaggcatcaggactcagacagacaattaaaaattctctgaggtgaatttccacccttagctcagaatactgtaatgtttaaaagctgttttctatacacacacacacacacacacacacacacacacacacacacccctttaaatcttttatcatgtaactcattgcttcttattttacccttttgtcagagaatacatataaaatactggaatctgatgggacattctactttatttaacaatgctattgagtttctcaaaatagtttcctaagaaagtctattaaagtattgattttttcataaaggataatacaaatggcatgagtctgtttaacattttaatcaagcttaaaattagtcttgcatttgaaacaaacttgcccagagaaattgttgagaaacttaagagaaaaacatcataaaaaattgatgggccagccaggctgtgagaatattaaaatccaaatctaaattatggttaaccattgtcacatctttctttgaagcttaagtaactcgatattccctgtaggatacccagtgattcaaagtgacacatatactgtcagctcattttccttcccagcatgctggtacaatttgtatccatagaaatatatggaaaaacctattagtcttgagtgccagaacctaccaaaaggaatctttgtcatctacaaataaattaataacataagataaacaatcctattaagttatactggcccgaaaagggaaaaaagaccagtttatgaattgacaaaagaaggtaaatgagattagccatatagcaaccactcagataataatgtgttttctctgtttagtaaaaaagcatatttgagagaaaattttcccttatagaacaattcttaataatatacatagatactcctttcctgggatgtagagtttaatcctcccctaagcccctccatgaacttggtaacttacttccagataatagaatatggaaaagtaggaataacaatggagaagaaaccaggcaggcaccaagttaactaagtagtcaagtataacatcgccagtgataataatattgatatcatgtctcctgtgatatgatgtcatgaaaaggacatgttatctctctggtattcttccccaaaacctgtaacttcttctaatagggaaaatacttcagtcaaatcttaagagacttctagaatatacctgactagtcctattcaaaagtttcaaggtcatgaagaacaagaagaaactgagagactgtcacagactagaggagaccaaaaagacccaaggaccaaatgcagtaggagattctggattggatcctgaaacagaaaaatgacatgagtggaaaaactggtgaaatctgaataaagtctgtagttttgttaatagtgttgtatcagtgtttgtttaaatgtttagataaatctctcatgcgtacagaagagttatcattaggggaagctgtgtgtcaggcacttagaaaactttcagatacataggtaccttttgtaagtaaaataatgaattaatgggtcattttatgtctgtattttatataaggctacatttctaaagagacaaaattgtgagtcccataaaaatataaaatgaatatgtgtaaaacattttattagatcattaactgatgaaggaattagtaagatgttagttacagttggttcaaaggagagtctgaagaattggcatatatatatacgtatatatacgtatatatacgtatatacatatatatacgtatatacgtatatatacgtatatacatatatgtgtatatatatattttatatatatacacatatatatataaaaaacactctagaatgctgataggaattttataacagatacaatactgatcactaactgtagggcaggaatctattgcgttccatgagaaaattttactggcatctagtgaacaagaatcatttgtgtcaccatcagccctccacaaattgacttttaaacgtacagaattgcaaaatagcataaccaaagtctaaggtacagactcttagataatcagataactcctaaggttttcctaaggaattaaagggaaagagacattctcagattaaggaaaacaaagaatttcttgctagcaaatctgctcttaaagaatgacaaaaagacattctctaaacagaaaggaaattataacgaagtcttgacatttcagaaagaaaatagtagaatgggtaaaaatgagagtaaaataatagactatcctatttaccataagtttgaagtgaaaactttaacaccacctgatgtggttctcaatgtatgtagagaaaatacttaagagttatattttaaaagaagacatacctaagtggaagtaagagtccttctacacgtcacctgaagtcaattccagtagattgcaatgttaatgcgtatcgtaatgcctggaaagaccactaaaaaactatacaaagtgatacgttaagaaaatacaacaaataaattttgatggaatcttaagaaatgttcaaataacccacaagaaggtaagaaaaaagaaagagaagaatgagaaataaagaaaacaaacagaaaccaaataaggtggcagattgaagccctaatatatccataattaccttaaatgcaaatggtctaaatataccaattaaaagagatttagctgagtggattgataaaagctgagcacacaatatgccgtctaaaagaagtttatttcaaatacaacctaggtaggttaaaattaaaagaatcgaaaaagttacattatgcaacaattaatcaaaagaaagcagcagcagtaatgttaatatcagataaagtaggcttcattgcaaagaaaattactagtgacaaacagggacattacataaagattaagtgttaattcactgggaagacataataatcctaaatgtgtttgcacctaacaacagagcttccaaatacatgaagcaaaaatgaatagagctgaaaaaagaaacagacaaatccatatttctagttagggacttcaacactcctctctcttcagttgatagaactactaaatggaaaataagcaagggtaaagagaactgaacaacaccatcaaccaataggatctaattgaagcactcctcccaacagtagcagaatacacattactttaaagctctcatgaaacattcactgatataagccatattctggactccaagcaacttcagcaaatttagagaattcaacttatatgttcccagaacataatgaaaccaagctagaaatcaataagagaaagacaaaagaaaaacctcaaaacacttggaaatgaagcagcacacctttaaatcattttccccaggtcaaggaggaggttgcaaagaaaaattttttaaacacaaagaactaaataaaatgaaaataaaacatcaacatgagtgagattctgaagcaaagggcaagcatatctactgtctatttttaaagattaagcttccttaagctcagggtttctctcctgtgatgcaatccactgtgtgtacaggtgtctcctgaacttctttgggattactctgtgggaactggctcaataaaatgttggttctttgactactgctttgctgtgagtaatctagtctttttctctggcaaaaaaaaataaagtgagatgtcataaaagcagtattgagaataaaatgtatagcattagattatttagttagaagacaggaaaggtctaaaataaataaatgagcctagagacaaaaaccatcaacaaaatattaaataacatgcgtcaaagtttaaaaaaagagtgtcataccataactaactgggatttagtattgaaggctggctcaacatttgaaagttaattagtgtaatctaccatatcaacaaactaaagaagaaaaaatcatatgattatattgattgatgcagaagcatctgacaacacccagcatccattcatgataaaaactatgagaaaactgggaatagaggataacttccacatcttaataaagggtatctacagaaaactacagttaatagcataattttaataatggaaggcttaatgtttccacccatgattgctaattagggaaggatgcccaatttcactactcttttttaacatagttctggaagttccagacactacaataaagcaaggaaaaacaataaagcatgcatattgaaaagtataaaataaaattatttctatttgtggatggcatgactgtgtacgtagaaaatatcaaatattctacaaaaacaaaagcaaaaataaccaaaaatgctcatggagctgagaagagaggttaacaagatccaaaaatacaagatcaacacaccaaagctagtcacatttttatatacagatgctcctcatcttatgatgggcttacatttagataaacccatcataaagtcaaaaaatcataaggcaagccatcacaacttacggattatctatgttggaaatgaagatgtgaaaagtgaaattaaaaacacaacaccatttataattgcttatccaaaaatgaaatacgtaggtataaatctatcatacatgtacaggatcggtatgtagaaaattataaaatgctgatgaaaggcattaaaaacaacctaaataagtggattatatggcatgtttatagactggaagagtcagcatagcaaatatgtcagttcttctcaaatcaatctaaaggtttaatttagtttctatcaaaatcttatcaaggatttctgtacacatagacaagcatactctaaaatctataagaaaagtcacaggccacagaataactaaaacagtcttttaaaaaggtaaataaagtgggagtaacctctctacccaatattatggctaacaatatagtaaggctatcaatacagtatgatgttgctggagggatagactcatagaccaaatgaaacagaatagagaacccaaaaacagacccatgcaaatgtgcccaacagatttttgataaagttgcaaaagcaattcaatagagaaagctcaccttttcaacaaatggtcctgcagaaattggacatccctagagtgggaaaaaaaaagaacttcaacctaaatctcacaccttgtaaaaacttaattcaaaatagatcatggacttaaatgtaaaacataaaactatcaaaatttagggaaaaatgagaaaatcttcaggctctagggctagaattggcattgaaagcatgatccacacacagaaaaaaatcagttggactgcatcaagatttaaaacctttgcactgcaaaagacctgtgagggaggatgaaaagacaagctacagactgatagaaaatattttcaagccatatagccaaaagatggatgtctagaatatataaagaactctcaaaactgcaaggtaaaacaagaaacaaacaatgcaattaggaaatgggcaagacacatcaagaaacgtttcaccaaaaaggatatacagatagcaaataggtgcatgaaaagattatcaaaaacattagccattagagaaatgcaaattaaaattattatatattcctacacatctatcagaatggctaaaacaaagtagttacaacaccagatgctagcaaggatgtggagaaaatggatcattcacatattgctggtggaaatgtaaaatggtacagccactgtagcaaactgtttatcaattttctgtaaaactaaacatgcagctaccatacaacccagcaattgcactcttggacatttatcttacaacctgtacaaaaatattcataccaccattattcattatagccaaaaactggaaagaacccagacggtcaacaatgaatggttgtacaaactacggtacatccatacataccaggcaatactattcagcaataaaatggaatgaaatatttatacatgcaacaacttttagatcaatctccacagaattatgctgagtaaaaacagctcatctgaaaaggttacataatgaatgattctgtttatatagccgtcttgaagtgacagaattaaagaatgaagaacagattggtgattgcaaggagtccgggacaacaggggaaagagagagagagagatggatgtgactccaaaagggcaacacaggaggcatccttgtagtgttggaactgttctttaccttgattgtgtcaatgtcaatatcctggttatgatattgtactatatttttgcaaggttttaccttcagggagacggggtcaggggtatactggttttctctgtattatttctcacaactacatgtgaacatacaattatctcaaaactaaaagtgtaatttcaaaaaacaaataaaacaattcagaaattttaagacttcaacagtcatttatctcatttgttattttactgttgagaaaacaggcacaaagaaactgaagtgacttactttcatgcttcacctaagtctttttttcttttctccatcactcagttaagagcttctgtaatacagaaagtatgtcttgtattcttttaactcccatattacttcaagcaatgttgaacacatgttaacattgtaaaagttgttgtctgagtaaatgggaaagatagaggtctatgtctatatgcaaatactttgtattaacatgtttcagtctgatataactttccacacagaaagtacaaaagaagatctgttcaagttatctgatttaattaagatagtaaaaagaaagctgataatttagggggtcttatttgattgtttttaattttacttattttccactaggtgatcattttgatgattcaaaaatgaaaatttacaaaaaggtataaaataaaaattatttctcctacctctatgcactgtcgaatcaattcccctacccaccaccaatcagtattgtcagctgtttgtatatccttcaggagatatgtacgaatttcaagcgaatatgcataagtttatgttatgtatatgtgtgtgtctgttttctatatatatgcatctttacattaatggtagcatacgatacacattttcttctgaattatgcttctctctcaacaatgtttcttggacattttcctgtatcagtacataaagaatgtatttgtttcctatgactgcaatagtgaaataccacaaactggatgacttaaccaaaagaagtctgttgtcttacagttctggaggatagaagtctgagatcaaggtgtcaggagggttggttccttctgagggctcggaaggagaatctgttccattccattcccctagtttctgatggtttgttggcaatctttggtgctccttgtcctgtagatgtctgccttcattttcacatggcatgccccctgtgtacgtgtctgtctccaacttccccttttaaggacagagtcatattggactcaggcccaaccaaatgacctcattttaagttgattatctctgtaatgaccctatctccaaatagggtcacattctgaggtaccaggggttaggacttcaacatttaaatttggagaaaatttggacagaattcaacccatagcaaagaacttaaccgttagtttaatgactacatattgttccattttgtggatgtatcataatctatttaagcagtgctctgaacattttattggttttcactttcattgttttgccttaatattggtgtctgtttcatagaatagatttatagtattttaggcttatcaagattttatttaaatcttggaatttaaattccctgtaaatttcaagtgccttgaaggcaagatatattgaggaggggagacttttaaagttcatatgaaataataaataatcgcaagtatctcaggaatgcatgaaaaataataaatgtctctgcatcaataataagggagggggcttgccttatccaatattaaacttgctgtaaagctactgtaatccaaatagtatagtattagcacaaaacaagacaagtagatcactgaagcaaaattgagagtccagaagcagatcagattgtttttggaggccgggcatggtggcttacgcctgtaatcccagcactttgggagtctgaggtgggtggattacctgaggagttcaagaccagcctagccaacttggtgaaaccccgtctctactaaaaatacaaaaattagctgggcgtggtggtgggcgcctgtagtcccagctacttgggaggctgaggcaggagaatcgcttgaacccaggaggcggaggttgcagtgagccaagatcgcaccattgtactccagcctgggcaacaagagcgaaactccatctcaaaaaataaataaataaataaataaatagatacaaattgtttttggaaacattatatggcaaatgtgttattttaattcaaggaataaaggtgttttattcaataaatggtgccagcactctttgcaattcctcttagaaaacacagattgcctcctagcttatgcaatgtaagaatacatttcaaatgcattaaagttttaaatgtaaaaacaaaaattcttggaatgaggaagacgttttctaaacaagacacaaaactcaaaagctataaggaaaaaatataccttgttactgcttaaaataacagaagacaaagtcaaaagaaaaacagcaaatagagtagatgtattcgcaacatgtgacataaagagatgcatatacctaatatacaaatttctcctacaaatttgttaattaaattaatattttttaaaattcaaacaacccagtacaaaactggccgaagtataggaatatgcaattcccagaagaggatatccagatagctggaaaaataaaactatgataatatgcttcctcatagtagtaagggataggaaaataaagaaataagacaccatgtctatctaacaaatagacagaaattaagaatgataatttttaatggaagagagcactctcagatattgcagatgaaacgcaaattgctgtggtctttgaggaaagaaatgtggtatgatctacaaaaattttaaatgcacttaccttttgatcagtcactccatttctgagaatcaatactacagaaataaaagtaccagtatgaaaggctgtatgtagaggatgtgtattttggcattgtctatgatggtcaaaaagtagaaatcaagcaaatacccttcagtgtggaaattattgaatatgttatggaattatttgggcatcccagaatgaattattatttagtctagttagagctgtgtctactgtcctgaaagaatggtgatgatatctttcaaaaatcaaaacaagtttcaattaacatattccatttttaaaataaaaaagataaaattaatcttatgggattacataaccatgaaggaggaatggagagatatatactaggttatcagtatttgttaccttggattttcaaaggagaatgaaagaggaacaaataatgtatcaagtttcacaaaaagtgaaaaggtggaatataaatattactgcaaatatataaccattgaatatgtatatggacaaggacgataagataatatagaaaactgaatatgttggttttattatgaggtggttggattgaagatatttttgtctccaaatactgttgttttaatatgttgtgttttacaaagaaacatgggctgagcagacagggaagccctgataagcatagtacctgccatgtggccattcaataaatgatagttattgattattattattagagttgtagtacagtagtgcctaccttaatatatttagattgatgcccagcagcattgagttaacccgcattttaaggacaagtgttatagctattatatactaatggtaaacttgagtctgtaactagcactgttgaaggaggacaacagagtaatatgatgtgtattggcctggggatggaagggtggtgcttaaggcacagcagattttcactccagccaggtttccttaggacctctccaatgaacaggatacctcccttcctgttctttctaccctcccaccccgttttttgctttttcagtttcagcccaaaggggaaggaagtatgatgactgactccccatcagtccctgaggtgaactgggattttgggagagtgtggcagctgcaaatttggcttcctggagataggatttttgccctcaatctggagaaagttcctgaggctacagctgttcaagcttgtgaagtaggaactttgatcccttttttcaaaagttttgtataattagcatccaacttgttagacagtatgtggctcattacaagattgccacaaattcatgctgggccgtgtctaagaacagggcaaagggagcctttggaaagtgttatacagttgaccctcaaacaatgtgagggttaggggcgctgagcccaacacattgaaaaatctaagtagaacttttcactcccccaaaacgtaactactaataggctactgttgacagaagccatactgataacataaagagtgattagcgtatactttgcattgttatatgtaatatatactgtattcttgcaataaagtaagttagagaaaatacgatgttactaagaaaatcataaggaagagaaaaatatatttactattaattaagtggaagtggatcatcatataggtcttcattctcattatcttcacgttaagtaggctgaggaggtggagggagaggaggggttggtcttgctgccaatctaaatgctgggcccagccaatgggtataagttttaagtgtgcacatattggtgaacccttacagatcacggcactgtctgttcgagtgtctattttgaaatgtccctatccgtaatataagttgcaaaggagtttgtgggcccactgaattctaccaccctgatcattgtgaagcccattcagctttgtgaagagcttatcttggtactaccttagccaaggtatgataactcagacataatgtcttttctttcatggttccttttttagtgatcatagattcagttctgtaataattagagatttatgtgtcctattagtaattgcatcattctttaaagacagtgtcaaccttgctatacagtgtgattgaagccttgacataacttgggggtttgttggcattttgaaatcccaggccccacttcaaaactgttgaatcagaatctgcattgtaagaagatccccaaaagatctgcatgcacaagccttgaaagagaagagaagccatctaacattcctcacctaagatttgaagaatttcccacttatgcaagagtaggggtgtgatttctcaggcaggatatctaacagaaaacaacacttatgaagtgtttcctgtaggagctaagcaggtggccagaaaatggcaggctacaaaggagaagaatgactaggaacctgagcaaggagaaagtctcaaagacaaggaagtggctggcagtgtcagggactaccaggcagctgaaaaagctaggtgtgaacactatttcttggagttttcagcaagtaagaggttcatgatgatgcctcaaagaatttacagtggaaccagagccaagaagtcttattgtggtgagttgggaattagggaaagtgttatacagttgaccctcaaacagtgtgagggttcggggcgctgagccctaacctcaagtaagaggttcatgatgatgcaatcaaagaatttacactggaaccagagccaagaagtctttttttttttttttttttttttttgagacggagtttcgctctgtcgcccaggctggagtgcagtggcgcgatctcgactcactgcaagctccgcctcccgggttcacgccattctcctgcctcagcctcccgtgtagctgggactacaggcgcgcgccaccatgcccagctaatttttgtatttttagtagagacggggtttcaccgtgttagccaggatggtctcgatctcctgacctcgtgatccgcccgtctcggcctcccaaagtgctgggattacaggcgtgagccaccgcgcccggcagccaagaagtcttatggtggtgagttgagaagtagggaggtggaaataaggaatggagatgaagacatgaaaggaatttgagaaatgaggcaatagctagagaagaatataggaatacacagatccagcaacccagcaagggaagggctagattctgatttcatgagcaaattgcctactaattaaattcacaatatcagaggaaactgttggactcacttactgaataatagctgaaaagtatctttgctttatagagagatcactgtagatgaaagtcatcttccagtggtgagatattcttcagtgtcatctcttcatttttatttctaatttttcttaatttgaattatttcttctgataatgggaatgatgtggtaattttgtctctcctgtaaattattttaaagatttgtacgaactcctttggcaggcttgagtgtgttgtgacagcttggcttagatatgcattgaatgtcattgaattcaaactccttaccaacatagttagatagcccataggcattctacttgaccctttcaaggagatctggagatgcaattgtaggggaaaaaagaagaaaagaattcaagaagcaacaaagtgaaagataatttggcttgcagaagagaggtctttctatcacagtaataataatgccaattatatgtccatatatatatatacgcacacatatatatagtatatatatatacacatataactcagacataattctttcatagttctttcttttgtgcacagattcacttctgttataattacatacttatgtgacctatttgttagtaattgcttcagtttcttaaaagagcatcaccttgctgtgcaaagtgtgattgaagcctcaacatctcttgggagtttttttagaattttgaaatcccaggccccacttcagaactgttgaatcagaatccgccattgtaagacaatccccaagggatctgcacgcacgttgcagcttgagaagcactgcagtatcacacatatacacacatattcaacaccaaagagagagaaagaggtcataagctctcaggtggagactagttccatgtatatatgcatagagagaagaacaaactctaccttccagcaacgtaaaattctactcaatcatgtattcaccaaaaaagaaaaggctttctccatataatgtgtattattcatatattggcactcttcagagctcttcattccaccctaatgttatctttcttagataattcacatgacactttgttatcttccaataatttctgtcattgttataagcgaaattattcaggctttatctaagagagtaaatcaaacagtatgcctctctcattccaattctgcaatattttcattctagaatgtctaaaggagccttgaaagagaggagaagtcacctaaggccagctagaggggatatatagcagggaatggtggcaactccactcctcgtagcccagtggggttttttttttttccaatctgtatttgtatgtgagtatcacgtctatgccgattttatgtgtacatatgtaactcaaatctgttcattgtgctagttagaatcttatttccccctcttctactacactctaccctttctctttcccctcctttggcaaccaagacactgagttattaataagcagattggagcaaacattttgatgcactattgtttgatagatttgttggttcattcaataagcattaattgagcacttgctaagtgttaaacaatgtactaattgctagatttaaggatgaaaatgataaaacccttggcctctagagcctagagtgtagttggggagacaaatgggcaaattagtcacacgacaacatattccttgttaaaacagacagttgtgcataagtctgtatacccagactggagatgactctgtttccaatgttgccctgggaaacctcatgatcagtttaataatgatgtttggggtgagaggatactgagacagtttgcttctagcatagtaattacccatagaagtttggggtctttattcaaaagagtttacaggccacatgagccactgtcttgccttttataggatcacatctaagttccgtgtcatataatggccttggccttcttggctttctctgtgctctttgcctgccaataccctaattattgaagtactgtctcccgcagctcctcaaccatgagctgttcccgatcctcccagcagctatgtttctcctttcttcaaacctctttagctttttatttgtactttatttgtactaaattgtatttagagctttggagaacattcttcatagttgtaattagactgtaaagtcctgagaatgtatttttcatcttcgtagccccctgcagtatctagcagaatgcctttaaacaaatgggcagtaaataaatcccaacaaacttaaattaaatttctccaaattgcatatttaattttatagtggcatttactgataacatacattgaaataaaggccagagcataatcctctctgtttctgaatattatttatttaaatattaactttctaatccaattaggtctttcaatgacactttagatctaaatttatttttgcattgttttaaatgtcatcaaatgattcatctcttgtgttttttaatatttttggaacgaacgtgtgaaaatgagcaagtgtcatcagaatatgatgcttgggtttttttaattcaacatttctttgatcatatatttaaagactttttctcaattcctttctggatgtggcctcacaaatcatttcagaagtcaatccatttcaagatttttttttttttttttgcttttttcacttcacaggaagtcaagttcattctttaaaatgtagcaaatgattaagcaaattcaacgaatgatcttcatcaactccgaggtgtttttcccccttgaaaaatttaagttactattatttttttttctttttttttttttttgatacagagtctcactctgttacccaggctagagtgcagtggtgtgatctcggctcactgcaagctccacctcctgggttcacgccattctcctgcctcagcctcccgagcagctggtaccacaggcgcctgccaccatgtctggctaattttgtgcatttttagtagagatggggtttctccttgttagccaggatggtctcgatctcctgacctcgtgatccacccacctcggcctcccaaagtgctgggattacaggcgtgagccactgcgcccggccaattattattattttttttaaacttcacctatcataaatcttttaaaatttcacctatgataaacttcctctgtcatctggggaattacttaaatgcaatgatggccttcaagtatactaccaggcagcctatccaaatcatgaaacagaaaggctcatagaccaaattaaaatacttgaatcacagagtttattaaaatcacagtgagaagcaaacgggaaagatatgtgctaagttaacacgcttagaatagagtgtaagcagactgtgaagattagagtacttgaattctgcagtacacaacattatatgtcttgtctgtctctgtattgcatcagccttcccaattatggtgtgcttacaaggaccaaagttgacttcccaacaagggagtccaaaatgggtggtgcctgattcagtggcatgtggtttatcagagacacagagacaagaatgcatggccacagctgtaacttgccaaaatagcctgatgactagccatgtaattctcaggcagaagacttacggtgctggaataggtatcacctatggatgcctgaattaagaccttgtgaacattaagtgctcatgtgtatttatttgatcttgaatatttagtgcctcttgtatatttggtctcatgtgtatttagcatattatgaatatttagtacccaggtgcctcatgaatattgggtatcttttggtccttctatccctcactatctatgtttagtacacacatgctctgcttgctaactacttatcttctaattaacacattccaagagccaattatgtgtatctctttccactgagttcttcattcaatgacatcaagttagttgcttgaaatcagctattgtgagagcacttacaccacagaaattggcaaatgctacaattagcgccactgccctcccctagagccagttatttgacatttactagcattccactacttacatggcccttcatgctctcactccgtgtgaccactcaagccttatccctctttactgaactctacaatcaaataaaatatctttgtttcttgcttctggccctccatcaaatggctccctctcctaggaacaatctgtctctcctctatcacctttgtttagctagttaataatcccttttcagacagcacctcataaatagattcctgaacatcccaaaccggatctcctgcaccttcaatgtgctacttcagtacatttgtcttaccctttgccatatggtatttcaattgcccatgaatttgtattcctgtttagatcttaagctttgtgaggtctttttgtacttttttgtacttccgtatacctaccacataataaatatttaatgaaagcattaatgaataagtaagtgaatggagtgagtgaatgagtattcaattatgattcatttgtatcaaagtgataacatatacttacagggaaaaggccagagggggaaaaaataaaaaataataatatattttatgtatgaccttgtgtggggaaaggaacatagggccactgcctggcctgcttcttttatgcaaatcctaatgtaaaatatgatcaacgcctggctgggcagaaatacaaaaacccagtactagtgattctcccaaccagataccagctagtacagatcatagccagatttaactactgtgaagtggttaggttagaggtgacctataaggaaatgacgctaatgatcattagcatcatcttggaagcttaaaaaaatgccccagctgtaccccaagccaatgatatcagacttttgtggggaacccagatatcattgtttttaatctttaatgattccaatttagccaaagttgagtctcaacaaaccaagttcttcttactctcatattctcttcttctcgcatagataagaattaacagccagctcttctacatgtttcttagacacatatattgtttcagtggtaattcgttaacagtgcatatgtcagcaaagcatgactgaaaaaaatatctgctcccacacattctgatcccatcttgacactgcatagctgttggcgaaggcaatttcaacaatgaagaagtgggagaaatgactacattttatgtaaatatgtattcattgaaaatcaaaaggacatatgtaatgatattgtttaagattctaaatgaaggacaatacttaagagtcctctgtagtcaaatttctcagcagtaaaaaaacattgtcttttctttacaactattaaccatatggctgtgaaaatgttattctacaagcctttaagatttgaaatctgactttatgttaatacacagaatttaccacacaatcctgtatgatttctaagtagatttaaagagtagctattgctcaccttttcaacataatggtaatgatggtgcaatgtcaattacatgatactctcatgggcgtgattatatgattgttaacacactgaagtgcttatatagacatagatactgatttttatatgtacatatttaaaacaaacaaggacttaaaatggcctgtaaaagtctttctagtcagtctttctggttttggacagagaacaaataatcccttacagctgttaggttggtgcaaaagtaattgtggtctttgccattgcttttaatggtaaaaaaaacgcaattacttttgcaccaacctaatagttatctacttccatctttaacgggccctacccaagactgcatggtatataagtaagaaatgtaaatgaaaatctcaaatgctagatctgcccaggaggggaccactaatgagagaggaaatgttaacgtcccatatgaactaagctcagcttagcatttacccttcctgctattccgctagagcagtgcttctcaaaagttgacctgtaatggaatcttctgaatgcctttttaaaacgtagctggctgggccccatccccagagtttctgtgtcagttggtctgggatggggcctgagaatttgcatctctaacaagttctcaggggatgttgccggcccttgaatcacaacttaaaaacctctgctctgaagaaagggaaagctctctctgctggatttccccaagcctttttcagattttcaggagacttctgtgcggtagcttgcttccttctttccatactactactactaccactactactactacaaatagcaacctctagcatattttcagtactaaatacccagcactatatatacatcacaaaagtcccttgaggaaggtggtattatcatctccattctgcggataaggaaatagataagaaatttgctgaagatcgcagagccaaatgagactcaaacccatgtaacccatgtctgtttgactttaaagcccggaatcttaatttgttccagacaagctcattatgtgctctgatcttcaccactgaaatgttctgaatatgaggctgagggcagcagtgaggttggaaggagcagcccagaggagcaggcactgtgctggtagaatagtagtatggtggggcctgcactccctaataaaagaaggggacaatgactatttcctccttctccaaggtcgtgctgcctcccatttctctgtctgcctggtaagaagcagctctgggccatgtgtggtggctcacacttgtaatcccagtgctttgggaggctgaggcgggaggatctcttgagcccaggaaattaagaccaaccctagcaatctagtgggacttcatctctaataaaaataaaaaacttagctgggtgtggtggcacacacctataatcccaactactcaggaggctgaggtgggaggattgcttgagcttgggaagtcgaagctgcagtgagccgtggtctcaccactgcactccagcttgggcagcagggtgagaccctgtctccagaaaaacaaaaagcagcagctctgaaaagaggatctagcagtttctatatgcaggagagcatttgcgcaattgttcctggggttgaatctgagaaactcacagtgcacattcagatactatttacaatcttctaggaatagtataaatattgtggccagggcaccttcatattgtgaaacacaaaaagacttcagaccttagattatgtgtcgaaagttaggcaccaatgatttttttttccatttgttcttaagtggcaaatctttacattaacatttttggtacttgtctttagggaaatttcttctctgttctgaatgtatatattgtaattcctcatttacaattttgcctgcaaatgcaagtgagtacagatcatccagttatgaaaatgctctgagatttgagtctagctgtttcagctttaagagccctgacctagactttgaaactgacatggttttatatgtatgtggttggaattaaacccaaagcacatcttttaaaactctgaggaacttctgtgccacagctttcgctcagttggtgagattttactttgaaatttaagggatgagtctagtttatatgcaaagaaatgtagggagctttgcaaacccaatcaaatcctttgtgaacagtgtgtgcatctgtttattttgctgtcattttgagtccatgatcctgtatactgttttgtgggcacatattgagggtaatatcaaataccatgtagaacagatgctgcaggtatcctttccatgtcctcttagctttggggtggtagatgggcacatggaccaagcccaaagtgacagggtattaacaggagcaagactcaaccaataagggagagtagatgggtacaaatctcagctttctctcccctcactgggataattttgagatatattccaaagatcctcagagcatccccaacagcattgagccccagttccccagattagtaatctactcaataaatacctcttttttttttttttttcccgagatggagtctcactctgcaccctggctggagtgcagtggcacaatctcagctcactgcaacctccacctcccgagttcaagtgattctcctgcctcagcctcttgagtagctgggactacaggcatgcgccaccacacccaactaatttttgtatttttagtagagatggggtttcaccatttggccaggctggtctagaactcctgatctcaagtgatccgcccgccttggcctcccaaagtcctgggattacaggcatgagccaccacgcccagcccaataaagaactctggattgtttcttccttttcctctcctcctttcctgttccctacagtgtttcctaggatcacctcagtctgctgtatgggaaacccagactgagtcaccataacagacagaggcattgttactttaggactttagtggatatagttacatgggagagagagactgtgtatgtatatataacctttataatattaaaccatgctatactcaaattatttactggccaagatttccaatataaattggaaataaattggatataaatcaagaacagttaaaattggaaatagttaaaatacaaataaaatagctaaaattgggcaaaatacctgacccaatgctttaatatccgattgcataattaaacgagtaaagaggaaaggaaattattagcaactctatatttaaatgcaactgacatccaaggaagtcatgaagaaaactctttgtgttgataaactgaaggcctcttctagcagacttctgtgtttattgttctgttgctgactattttattccaaacaaatgaacttgcttgtcattataccccacccttccctagtacagggcccccattctttgaaacagtaactcattcagttccaaggagaatatgaaaagggagggtaatatataaaagaactgaaatgaaaagtggcctaagtgtggcacatttccattgtggattccatggcaatggagaattgatggcagagcatggtgagagatgtgaagcatcaattggctgtatctccagggaattcctgaagttcagttgccaccctggagggtggcaaatgctctctctcaccttccttgagttattgcttagatgactcaaaacaaaaaactgatgagctataaatgggctgtattatttgtttttacctgctgagtagttcagatatttcaaaataatctcaaacttaacctatggtgtggtttctgtgttaaacaaaataccgtaacttttagttgaaaatactgtgtaagcccacacaatctcttgttcacagataatcttgttgtcaaacattcatgatgacaaaaactcataaacgattcttttaaatatcaagaataacttatgctgtaagtcataatttcataagcatgaatttatgaatgtgttttgtgtttgcaattttcatttaggttgtcttaaaatcatgcgttttagcttaacttaggagaaatatatcttttgtgacaacataggatattcagagaaacgtgaaaactaggtgatgtgttttatgaaagaaggcataaagtatatcaagcataagaactttgaattctatttgtgttttttgtggctttagaaaagattgttctgggaatagagaattccatttgggaaacctagcacatacacagtagcagagttaaaatactgacttggagggttcatttgaagaattctatagaatttttgcatgttgggaataggtttatattcttaaacattgcactcagggtttctattcaaagcaaaaataactttgcatagaccttggccattctttcacattctaaagtaatccatttttttttttcagggtagttgttctcagtcctgattttctgataattcagatcatctttaatttacaccaaaaacttttagaagagtcagataataatttaacataaaatgtaaatgactgaaatatacattttttaaaggagcagatatggaggggtccaatgtacttaactatttgctctctttgtctccttgcattcacgggaatgtttctatgtagttttctaatttcacacaatttcaataatccataccctcctcatttttatgggccttcatgatactaaaaatgttaccagaaattattttgtgttagtctctttgtttagcacattcatacataagttttaacatttaactggcatatttttaaagtaatacatgttttttttttaaaaaaaatcagttatgtttgtgtgtgtgcatattttcttttgtggccaaatgttgcacgccctagtccttctatttaaacaatgagtttacataacaaatgttacatgataaacatgaagacatttagtttgaaaaaaaatgattttctagtttactcatttaaaaaaagctgaagtaaccgggaagaggagtggcagaacatattagtctttttcataatgccatcattaaacaaagatacttaatttccaggcctggtgcagtggcgcagcctgtaatcccagtactttgggaggctgaggagggcagatcacttgaggtcaggagttcgagaccagctttgccaatatggtgaaaccctgtctcaaaaaaaaaaaaaaaagaaaaagaaaaagctacataatttccaaaatgacttcagtgggacctgaggtgagggaataaaggctctggagtaatttcactctctattcctctcctaattttttttctgttcctttataacaacattttcactacttttgagcttgggagttgaggaatcatgaccagaagaaaaggaaagacgggaaagatgttcaagggtgaggatgcttaagaatgacctggcaagcttatgaaaatgcagttgtctggatcccaccacagagattctgatttagcaggtctgtggcaaggcctgcgattctgcattgctaaccagctcccaggtgatgacactcatgctggcaacctatgaaccattgagtggcactgttccagggggcagggcaatgagaaattgaagtcaaaagccccaagacctggtgctacgaaaatactctggttccttccctctcaactgatttacttgtcggtgtgattttgcaaaaatccctgaacttcttaaatcccagttacctcacctgaaaagtatgagtgttgctccagatctggaggctttcagaccatgcaaatcgaattcaaaccatgcaaaccattcaagtcattctagaaagttctgcaaggtgcctcagaggccaaagggagagatgggaagagggattgaatgggctctttccaaggttccctaacccacttgaatactttcatcttttatctctttcatatattccacttttgagtatggtttcatttagaaaataggattttataccaacagatttaaagaaaaactccaagtctgaaaatgactcatttatttaaaactgtatagaacaaagacatttagtgcacaattccaaaaattctctgatccttccacagcatgcccagtatgctgcaagagtgccagcaaacacatgcttactgctcacaaatgtgaaatttaaccccatgcactaggaggtccctagtgtggggtggttttagctaaccagactaagagagtacagggcaacatcgagcctttctctgcggtcatgtctgattcattaaaaatccagctttccccgaagatatattaattaccttctgtttcagaatttgtttttagagcctaattcttaattatatctccagccattgtgtgatttgaccattttggaactaaaaagttatcctatgaaattccacctccaactattgccacactgttagtttgtctatttcatacaccatgccaatcttagcgtggtgctagcatttcattataaccagctttcatttttaataagaccatgtgtatatgaaattgtagacttcagtctttgtatgaattgaaagctattaatcttcccagggttaggttatgttaaacagattgtaatgttcttctttttattatgttatttaaatccccttcatttcatactgcaccaatacatttctactatcttggaataaattaattccagttacgtgatggaaaattttagtgtaaaaatataacctgcagtataattttttctgtcagaataccaactagaactggtatgtttcattctaattggaaatttgagttatcgctttgatttttaacagtgggaaaggaaaatgaagattgatatctttcaatagccgttcattcattcttcattccttcattcattcacgtattaagaatagtctatgtgctaagaacagaaagagtgttagagatatgaagattaataagaccagatccctgcctgcaggcatttcctattctatgtcatagatagggggctattctgtttagaggtaaagcatgacccacattgcctctgacaagaagcataatgtctgtagcagctaactgctggagacaggaggctagagggctgccctggtaattggtattcaagtcttcaagaaaggaaaccagctattccaaaatcagtgggcaagaggaagttgtaaagttaagtgaaatgactaaaatatgaataactaaaggttggaatctggtagaaggagaggagagcatcggtcagcaccttagtttgggaaggtggtgtggccatagtaggctttatttagaaagaagcaattcttaggtaccagctaggtttcagttccttaaggggagaaaactggcaaaatataggcaggtttccagggtgcaaagccacgttctagcttcagctcaggcaaggccctggggtatgaatcaccaccagagtagcccagccaaaatgactaagggatctaagctggttgctaatgaaagaggttgcagctcaaggcagctctgctgacgcccactggatactgggattacattgatttaacacatggaaaccacttaatatggtatgtggcacaacacaattaagtactcataaatatttgcagataatgctgctgccattgctgtttttgtcgttagaagactcgggaaaatcatctaatacaggaatccatctgttggcggggcttgggcttctaatatttgactggttgatttttgtcgacccaatcttaacaatattatacacagccattacttcaggaaaggcagttgtaaagaatggtataaatttcctgtaacttgactgccacattctagctgagtcacctctatatacctcagtttctttgtatccgcagtgaagattaatgacctcatagggttgttattagaatgaagtgaattactacactggacttatttaggacagtaactcgcacatagtgagtgctcaaggaaatctcagaccctgcctgctagtggagggtccagctcctgatacatttgggggcaggtttaaggagttcattgatttagagctgtaagggctgatctttcaccctgcatgtcttcagcaactgtggctggtaaagtccagagcagtcaaaggctgacaaatccttgttagaaatcacaaatgcccattctcacaacttctgtggtgttttccatcctttccctagaatactttctttttaaggcaaaggaaagaataatcactgcagatagcacacagtatttttttgcaacatattttcaaaaattatgatgagaaaagtgtatcattcctgtgaagaaacagcataaggaaaatgatttgagaaagaaacatggttcttaaactgaaacaagtgtcagaaggaatcccagaaggcagaaggaaatatagtaatcatgatgaagtctagagctcacaccggttaacagaatggcagcagcgatattcatctcacgcctcttccatgctgtccctgagtgagcttctgctgaattgcctggctggtgaggattggtttcagcagcagaaggaatgggctgccagctgaaggctctggttctgatcctgggtagggtcagagaaagcaagatgtgaccatcacttttgaccttggtcttgaatttgattccatggaacaacgatattttacaaacccagttgaaggtttatccctttttctattcaacacagggagagtccttagagccccaggaagacttagccctttttcattctaagagtaaaccacatctaggtttccagagatgaaaagaccaggctctgatcttccttctggaagcccttgcctattcaacaagcatgagtattaaatgctattgccttggaatcataattcagttttcacagtttgggctatgtcagaaccattcttgtcaaccccctgttttctgagaacccgaaacctgcttgtttagaattttagaatctacttgactcttacaggggagaaaagatctcttttctcacccatcgctaggttcatggctgaggcacctataatgaaggacaaatcaacaacataaaagcatgcgaatttatttaatataagtttcacatgacacaggagccttcagaaatgacccaaagaatcagggaaaagtgtgtatttttatgctctgatttgaggaaaagtagatgtccagtatgactggacaaaggggaatggtaataaactggggtgaccacagcaaggcctgtttctgcagaacctcctgtgtccctgtgttttcagaggtaaaaattttcctttccttccagtatagtaagggcacctctggtatgatagtctcatgacctgcttcaggggagaagggggaaggggaaggtgagagtgaccatcctgcttctgctgtcttctcaaataccaagctgccatattgtggattttggagtagcgtaacttgaatccttttttttttttttttttgagacggagtctcaccctgtaacccaggctggagtgcaatggcacaatctcggctcactacaacctccacctcccaagttcaagtgattctcctgcctcagcctcccgagtaactgggattacaggcacatgccaccatgcctggcaaattttttgtatctttagtagagatggggtttcaccatgttagccggactggtcttgaactcctgacctcgtggtccgcccacttcggcctcccaaagtgctgagccaccgcacccagccgcatagcttgaatcttatcaataccttaaccaaatgactctgacagttttcctcttcttatctaaattcttgagggtcacccacacttcccaatgtcttttgaaacttgacctcttttctgctgaattgaggaagatacctgatttctttaacctcaccaaattcctacttcttactgttgttcattgctggctgaaaatttactttggcgagttcaccaagaacatacttatcggttcactgtttatatttgcactcaagataacacttgaggccctgctactcaaagaatttagtgacaactttcttcatcactctcatatcttatctgtcatcaagtctttttttcctcgtaaaaatgcttttagctctttaagtatgtttcatatctataatagctaagataggctaacagctataatatattaaacatccaccaaatggactattaaaatgacttaaacaaaatagaaatgtatttctttctcatgtaaacagtctaaggtgaattcatgttagttggtgttggatgtgtgtgtgggaagggaggggtgacacccacataattattcaagaatacaggccaggccaggtgcagtggctcacacctgtaatcccagcactttgggaggccaaggtgggcggatcacctgaggtcaggagctcgagaccatcctggccaacatgatgaaaccccatctctactaaaaatacaaaaaatagctaggagtggtggtgggcacctgtaatcccagctacttgggaggctgaagcaggagaatcacttgaagccgggaggcggaggttgcagtgagacaagatcatgccactgcactccagcctggcgacagagcaagactctatctaaaaaaaataaaataaaataaaaataaaaaataaaaaataaattaaaaaaaaaacaggccagcaagggtcttccatctgcaatagccaattgccgaggttgccctcctgaagatattcagccagcccaaaggggaatgagctagaggactgcacacggaggcgtcccatgtcctttgactcaaccttctactggctagaactctgccctgtggccacatgtaacagcagaggggctggaaaatgaagtctagctagatacctaaaaagaagcagagaaaggtttcaagagcatttagcaaccatatccaccttattcatgccctgccctctattcgcagtggccccgcagcactgctcaactagcttgctgcattggcctcttatctcttatctattgccttagatccatctaaatgctctgctactcttatgcctggaatatgttttcaagatgtgactaatcctctcacagcttgaaggataaaaggtcaaactgctctggtgaatgcatgatgcctggtcacctctgtagccccatcttccctgacactttcacagacagtattccctttactccaacctgtgggagtattttctaattcacaataatagcaggaaatacaatgtggaccagacacagttctgagcagtatattaactcatgcatttcttacgataactttataaggttgacagtagtagtatccctatttcacagagaaggaaagagatacagataagtaatttacatatgatctcacagatagtaagtggtacagcttgagtgcatatgactcaaagggtagaggttctagattcttaatcactgtattgtactacttctcccaatgttatcgtacatgccattccgtcttcctggaatacccttcgtctttcttcatctaacttccactcaaactttaaggatcaatttaagcatgccttattttaggtagccatggttgacatcagcctaatttaattgctactcatctatgtccccatagcgtcctttgcattcctctatatctctctgctatagcagtaaatgtaccaccattccgtaaaatccttaagggaatgtttagttttatgttcccaatgccagcacaatgtccagaacagtgttgtcccatagaaatgagagccacctatgtaatcttaagtattctagtagccacgttctttaaaagtagaagtgaaactaatattttattgaccctgatatatccaacatattattatttcaatatgtaatcaataaaaagtattaataaaatttgctttttccattctaagtctttgaaatctggcatgtgtctttcaattgcatcccatctcaatttggacaccgtattttcattgaaaatatttggtctcacctgcacacgtatgtttattgcggcactatttacagtagcaaagacttggaaccaacccaaatgtccatcaatgatagaccggattaagaaaatgtggcacatatatatcatggaatactatgcagccataaagaggatgagttcaagtcctttgtagggacgtggatgaagctggaaaccatcattctgagcaaactatcacaaggacagaaaaccaaacaccacatgttcttactcacaggcgggaattgagcaatgagaacacttggacacagggtggggaacatcacacaccagggcctgtcgtggggtggggggaggggggagggatagcgttaggagatatacctaatgtaaatgacgagttaatgggtgcagcacaccaacatggcacatgtatacatatgtaacaaacccgcacgttgtgcacatgtgccctagaacttaaagtataataaaaaaaaaagaaaatatttggtctctatttacatttcataaactttatagttgaaaaaagaagattcacattcctaagttgttccaaacatacacaaaagtttttcaataactgaaccaagagtcaatttttaaatttatatttaaatttaataaaatggaataaaaatttgttaaacttcagtctctccgtctcactagcctgatttcaattgctcggtagctacctacagccagtggctcctgtgttagacagagcagcacagccctagaacacagtagatcctaaatcgatgtttattgaagaaattaatcaatgacagtgtagaaaatttgcagtgattatgtcagaatcaatagttctccacccattttctcccacactctcaaaagggccaagttttatatcaccaaatgatattcctcttacttctttctgagcagaaacagttttggaaattaagatctttttcaaattttccagactcggcattttagcagcgtttctatttgtaccaacaatgcctttctacctattttccttgcttcttaataagttaactttgtgcgaaggtcattttgtaggtcagtgtaatattgtgcattaagggcttctaagttttctggtattataagaactccttggtttccttctacttttcagaatggaaaatcctcagagcaattttcatctaaaagtgctgcatttaggttgtttcacaattccccaaccctgagtcaaatataggttggtgtatgagcagcagtgtctcttggctaatcaagagcgtctccttttgctacgctcagtgttagagaaatggagaaagtcagctgggtttagagattaggtgagagactcaggcatatcctttgataagtcataaatcatttcctgtttagaaaagcacatgtttagacacccataaaatctccaaatgaagggtgttttacttttccttcaaaatctcactgggaaaaggtacttctgactttccaagtgaataaaaataatgactcctgattaccatgtatgtttaaactgatttgcaaagcaagtgaaaaagagtctagtgagtagtgataagcatcttttagacatcagaagatgtactgatttaaaggtccgtatcattttataactagtatctattgagattcaaatggttattactctgtgtgaatctgtcttttctaattgtttttacttattttagaatatcgatttgtgaatattaaattcctaagttttccagcaatccagtgtttgttttggatatccagcctggatgcagaatagctgcagaaagttatcacaaattgatctctatattctgtttccgagtggcaattgtcaaaaatttggggtcatcggctacccctcccacccctaagaagttccttgtacttcctctttcaaaacactcacatcattgttcagtgcctcacttctctactaaaatgtaaccaaccacaaagatagggactatgtctttcctgtttactggtggattctcagtatctagcaccatgaccaatgttaatagacgttgaatcaattccagttgttacctcttcacactgggacaaaagtccttgcaagtattctgctgccatttgtatagattcaagccaaatatgtctcaaaacgatattacagatgatctcttcgttgttcctctgacaatttctttcccccctgcattgcttaacttgattgacaatgacccctactacttataacatgtgccttttaggtagtgcacttggcactacattttatgtgatagttttatgatgctaaagactatttgctgtgatgatgctgtgttctcacatggcatatccagatttatttatgctggtgaccaaaggcaggtagttaaccttgaaaataggttaaaatttgaaaggcagcaaatcttagggctagaatttataatttatctttaaggaatcttgaaaccaggtgtgaaggaagggacgtaggctagaagtacagaaacctgggttctgctccagcactgatgttaagagcaagttgcattgcttttctggaccttaattttctcttctggaaaatgaatagattaactggaacaaggaaggaaaatacgtgaatggcttccgtttctgtctcgtttacccctgaaagacatggctagtcagtcagctctgtatcagagcacttctcaaggcaatgctccaggtagctaccactcactaatgagagttagcacataggtaaaacctctttgtcatctctaggctacttcatgtttaagatactctccagctttaaaattctaataactctattagactgaaatttaagaatacgagaataatcatccctcaccatgaagagagagtctgaggaaaaaataatgagaacgaataacccttctcttttactacaattcaggactgccatgaagagccgtccagattgtgaaacatacaactcatgatgtgaatggtacttctttgtttttctcggtgtacaacttgcacagctgttcatggccctctgcttccacaaattcatttctaaatagctgtacctcagttctttgacttctagtatgtctaatttaatacacatttctagatttacgatatataagaaatatctccatgaaggaaaaatgtaatagcccatgcttttcattataatagaattttatgaaacaatgtcttttaaaaacagaaacatatgtactactacttcgcaggacattagcccttgtatataaatcaataatacaaaaaattcaaattaccaaggattagaaaagactgctgtgggatatcttctggtgcaagcatacagttatttatccatttctttcatgaatatttattgatgttccaaacattaggctagacactagagacacatcaataaataaaggaaataggtttgatctctatcttctttgatctgtagtttagtgggggaggaaggaaattaaacaagtaactactacaggttgaacatccctgatccaaaaacctgaaatccaaatgttccaaattccaaaactgtttgaatgctgacatgacatcacaaatggaaaactccacttctgacctcatgtgacaagtcacagtgaaaatgcaggcacaccacatagagtttattcagcatccccaagggaagaaagatcctctcagcccccgttagctgtgatatatcttttccacccacacccagattccatcatacaagcaaacccacaaaaggtacgaaaaatggcacatgtgcgggctagacgcgacaacggcaggtaccctacaatgtccagcatggggccaaaacctacgtgcattaatcactgtgtttgctggtatattctctggtggtgtcaagatattgttgaaaatgccctaaaggcctgcatgatatccatagggtaatgcaaatattccaaaacctgaaatttgaaatactttcagtcgcaagtattttggatatgagatattcaacctatagatggtaagggtattactatgatagtgctacgggtgtacatcaaggtaattgaccctggcttggcaggatgcagaaggctttcccaaggaagccttacctcagctgagacctgaagagaagcaggagttagacaggtcaagttggggatttggaggaggtggagtcccagcagatggaatactatgcataaaggcctggaagtgagaaagtcatgtcatgttatttcaagggactagaggaagcttagcaaactggaggcaagaagatagcttcagcacactattgaaattgtccaggtgagtaatgatgatagtgtaactaagttgtgatacctaggtatgtgagctgaacctatggagaaatgttctaggctagagaatctttaattggatatttaattatcagtatatacgtaattaaaaccttgcaagggtttgaaatggttcagagtaaagttcgtagatgagaagagggcctaggagtgaacccaggaaaatggcaaagtttcaggggtaaataaagaaaaataagctttcagtggagacagggaaatttgcagttcagtagataggagacagactaggttcgtgtgatgtcacagaatccaagggaagagaggttttcaagaaaaagtaacatttagaggtgtcaaatactacaaaagcatcatgaaagataagaccaaaatatatcctattaatttagcaacaaggaaggtattgacaacctttatgcaagtgatttcagtgttgattatggagaactcagtaattacttggtggtaactaaagaaccaagattgcagtacgttcaggcatgattgagaattgagaaagtgggggagcaagtgtaaaacaattattttaagacttttggctgcgatgggaagagagaaagggccatagtagcagaagatggatgtaggggcaggaagaacacactcttaaaagggtagtgacttacacatgtttaaatggcaatgagaagaagatggtagagagggagaggttgaggatgcaggagaaattagagataatcaatagcacaggtacttgagaaggcagaaagatgaaatttagaaattagcttcagataggaaggaaagtacagcttctattacaacatcaggggagaagggaaggaggatgggcatagctactggtagttttgtaagtttggtgaaaggttaagtaggattgttgtattggatttattttttattgaagtggaagctgcagctaaatgcccagtgatgaggaaggtgttggagtctgagatttaaggtgagtggcaatttgaaatagctgctctaggatcctatttaacagagaaaatgttgagtacacaatcagtgagcagttttaagtccactctattctgtttgcagtttcaagtacctttcattgcttctaagtttatgaaaactggttcacaatcttcttgtgcttcttatttctacctcttttccttctgttttctcacctccccagtttaaacagtcccgaattttttacaattaaatatacagcaactgccatgaaatctactgataaaagatactgcaaaatcagtttgggattgggttcattagcttacttattattatcaatcctaggccactaagcaaccttgcataaaatgcataaaatgaggagattctagtggaggatagttttcaattatctcattaatttcaggccatgtgactagtccaaatagatattataggccaagaagagcctatcttgagattttaactcccaggataggttttctacctgatcaaaagaatctaataactattcaatctcttcttaaatggtttggttttctgtgcaaacagttttacccttttagctgattttctaggtgttaaattaagaaaattctctcagatacttgttcatcatgtactaggatccctgatgtgttcagagttgtccaactttcaaagggctttgcattcagagtacctaatctaaaccctgatatcattcttttataacagaaaaccccggattagactgggacagtgtctgtcatgttcatcactgcatctccctcagtatttgtagaatgaatgaagggacaatggcaaactatagtcctaccatcacacttttggtagtgaggagaactgctgtaacttggaagattggagggggaaaaggtggctaaaacaatcatacagtaaactgggctgctatcaagagaaaccatttgtcaattttggcttttgttgccattgcttttggtgttttggacatgaagtccttgcccacgcctatgtcctgaatggtaatgcctaggttttcttctagggtttttatggttttaggtctaacgtttaaatctttaatccatcttgaattgatttttgtataaggtgtaaggaagggatccagtttcagctttctacatatggctagccagttttcccagcaccatttattaaatagggaatcctttccccattgcttgtttttctcaggtttgtcaaagatcagatagttgtagatatgcggcattatttctgagggctctgttctgttccattgatctatatctctgttttggtaccagtaccatgctgttttggttactgtagccttgtagtatagtttgaagtcaggtagtgtgatgcctccagctttgttcttttggcttaggattgacttggcgatgcgggctcttttttggttccatatgaactttaaagtagttttttccaattctgtgaagaaagtcattggtagcttgatggggatggcattgaatctgtaaattaccttgggcagtatggccattttcacgatattgattcttcctacccatgagcatggaatattcttccatttgtttgtgtcctcttttatttccttgagcagtggtttgtagttctccttgaagaggtccttcacatcccttgtaagttggattcctaggtattttattctctttgaagcaattgtgaatgggagttcactcatgatttggctctctgtttgtctgttgttggtgtataagaatgcttgtgattttagtacattgattttgtatcctgagactttgctgaagttgcttatcagcttaaggagattttgggctgagacgatggggttttctagataaacaatcatgtcgtctgcaaacagggacaatttgacttcctcttttcctaattgaataccctttatttccttctcctgcctgattgccctggccagaacttccaacactatgttgaataggagtggtgagagagggcatccctgtcttgtgccagtttttaaagggaatgcttccagtttttgcccattcagtatgatattggctgtgggtttgtcatagatagctcttattattttgaaatacgtcccatcaatacctaatttattgagagtttttagcatgaagggttgttgaattttgtcaaaggctttttctgcatctattgagataatcatgtggtttttgtctttggctctgtttatatgctggattacatttattgatttgcgtatattgaaccagccttgcatcccagggatgaagcccacttgatcatggtggataagctttttgatgtgctgctggattcggtttgccagtattttattgaggagttttgcatcaatgttcatcaaggatattggtctaaaattctcttttttggttgtgtctctgcccggctttggtatcagaatgatgctggcctcataaaatgagttagggaggattccctctttttctattgattggaatagtttcagaaggaatggtaccagttcctccttgtacctctggtagaattcggctgtgaatccatctggtcctggactctttttggttggtaaaatattgattattgccacaatttcagagcctgttattggtctattcagagattcaacttcttcctggtttagtcttgggagagtgtatgtgtcgaggaatgtatccatttcttctagattttctagtttatttgcatagaggtgtttgtagtattctctgatggtagtttgtatttctgtgggatcggtggtgatatcccctttatcattttttattgtgtctatttgattcttctctctttttttctttattagtcttgctagcggtctatcaattttgttgatcctttcaaaaaaccagctcctggattcattgattttttgaagggttttttgtgtctctatttccttcagttctgctctgattttagttatttcttgccttctgctagcttttgaatgtgtttgctcttgcttttctagttcttttaattgtgatgttagggtgtcaattttggatctttcctgctttctcttgtaggcatttagtgctataaatttccctctacacactgctttgaatgcgtcccagagattctggtatgtggtgtctttgttctcgttggtttcaaagaacatctttatttctgccttcatttcgttatgtacccagtagtcattcaggagcaggttgttcagtttccatgtagttgagcggctttgagtgagattcttaatcctgagttctagtttgattgcactgtggtctgagagatagtttgttataatttctgttcttttacatttgctgaggagagctttacttccaagtatgtggtcaattttggaataggtgtggtgtggtgctgaaaaaaatgtatattctgttgatttggggtggagagttctgtagatgtctattaggtctccttggtgcagagctgagttcaattcctgggtatccttgttgactttctgtctcgttgatctgtctaatgttgacagtggggtgttaaagtctcccattattaatgtgtgggagtctaagtctctttgtaggtcactcaggacttgctttatgaatctgggtgctcctgtattgggtgcataaatatttaggatagttagctcctcttgttgaattgatccctttaccattatgtaatggccttctttgtctcttttgatctttgttggtttaaagtctgttttatcagagactaggattgcaacccctgcctttttttgttttccatttgcttggtagatcttcctccatccttttattttgagcctatgtgtgtctctgcacgtgagatgggtttcctgaatacagcacactgatgggtcttgactctttatccaacttgccagtctgtgtcttttaattgcagaatttagtccatttatatttaaagttaatattgttatgtgtgaatttgatcctgtcattatgatgttagctggtgattttgctcattagttgatgcagtttcttcctagtctcgatggtctttacattttggcatgattttgcagcggctggtaccggttgttcctttccatgtttagcgcttccttcaggagctcttttagggcaggcctggtggtgacaaaatctctcagcatttgcttgtctataaagtattttatttctccttcacttatgaagcttagtttggctggatatgaaattctgggttgaaaattcttttctttaagaatgttgaatattggcccccactctcttctggcttgtagggtttctgccgagagatccgctgttagtctgatgggctttcctttgagggtaactcgacctttctctctggctgcccttaacattttttccttcatttcaacttggtgaatctgacaattatgtgtcttggagttgctcttctcgaggagtatctttgtggcgttctctgtatttcctgaatctgaacgttggcctgccttactagattggggaagttctcctggataatatcctgcagagtgttttccaacttggttccattctccacatcactttcaggtacaccaatcagacgtagatttggtcttttcacatagtcccatatttcttggaggctttgctcatttctttttattcttttttctctaaacttcccttctcgcttcatttcattcatttcatcttccattgctgataccctttcttccagttgatcgcatcggctcctgaggcttctgcattcttcacgtagttctcgagccttggttttcagctccatcagctcctttaagcacttctctgtattcgttattctagttatacattcttctaaatttttttcaaagtttttcaaaagcaatggcaacaaaagccaaaattgacaaatgggatctaattaaactcaagagcttctgcacagcaaaagaaactaccatcagagtgaacaggcaacctacaacatgggagaaaatttccgcaacctactcatctgacaaagggctaatatccagaatctacaatgaactcaaacaaatttacaagaaaaaaacaaacaaccccatcaaaaagtgggcgaaggacatgaacagacacttctcaaaagaagacatttatgcagccaaaaaacacatgaagaaatgctcatcatcactggccatcagagaaatgcaaatcaaaaccactatgagatatcatctcacaccagttagaatggcaatcattaaaaagtcaggaaacaacaggtgctggagaggatgtggagaaataggaacactcttacactgttggtgggactgtaaactagttcaaccattgtggaagtcagtgtggcgattcctcagggatctagaactagaaataccatttgacccagccatcccattactgggtatatacccaaaggactataaatcatgctgctataaagacacatgcacacgtatgtttattgcggcactattcacaatagcaaagacttggaaccaacccaaatgtccaacaatgatagactggattaagaaaatgtggcacatatccaccatggaatactatgcagccataaaaaatgatgagttcatgtccgttgtagggacatggatgaaattggaaaccatcattctcagtaaactatcgcaagaacaaaaaaccaaacaccgcatattctcactcataggtgggaattgaacaatgagatcacatggacacaggaaggggaatatcacactctggggactgtggtggggtcgggggaggggggagggatagcattgggagatatacctaatgctagatgacacgttagtgggtgcagcgcaccagcatggcacatgtatacatatgtaactaacctgcacaatgtgcacatgtaccctaaaacttagagtataataaaaaaaaaaaaaaaattaaaaaaaaaaaaaaaaaaaaaagagaaaccagtgctctattatctaggtatataccaaggttacccactgcttgactctcattattagccttctttgatgttctctggtacttgatgtctttcataactaatcaatgtattaatgtatccaatcatttactcgataactttattgaaagcaaaagcagttgcataccagctatcaagctggaagtgggagatacagccgcagacaaggcagatatggtcccagcccttaggagctcccagagtagcaggaggtttccccttccagtgtcttctctctgcttttcttcaaaaggaaaaggctgatgtgtataatataccatatctctttgaagttctctgattatggattttaggtttaaaccagttcttcatccatgactttataaattgaaaatccaggattttgctgtgttgttgtgttcttgttttgttttgatgtccctgttttctctagatacagttagaaatgtctaggaagaaatttttggttagtatgggagccccacaaagccatttttttaaacataaaatctgtattacatatcaggtatgaaatacagggggaatgaatcatttctccgtaaaggaaaatttaaagtaaatttcaggaaagtgaattctttcccgtttgcattaccgacagatgcagaaactttaatcgtcatttgctaagagggatatggcagataatacacaatagatgtcgtagcaacattcactcgcattctttttttttttttttaaagaaatctttctttcaagaagctattctaggatctttctcatgacagtgtcctagttcttatctttgctacacacaggctcacaaagtgttttctttgaagggcattttgttattggccctcttttcatttttcttttccgtagcaaacagaaccgaaggtgtttactccccacggtgagagggcacctgggtgcacaaacagtggtgtgaaccactggcctttctctgctttccgttccctgaatgtaagaaacaggtgcagtgatcaattcactgcgtgcagtgaaccccaggcagaaagagaacgtcgtgtcacagaccttttgttacttggagagaatgagcgggaagaaaggctgcctctgctgctactgagacccttttgcccattttattgactgctataggttcatctatcctaatttgtctccggctgtcccagtttatccctgttattcttgtgttactttactttactatattttattttattttattttatttattttagagacagagtcttgctctgtcacccaggctggagtggagtggcatgatcatagctcactgcagcctcaaactcctgagctcaagcaatcctcctccttcagcctactgagtagccaggattatagctgtgcaccactatgcccacctaattttttttttttttgaaatggagtctcgctctgtcacccaagctgcagtgcagtggtgcgatctcggctcactgcaacctccacctcccgggttcaagcgattctcctgcctcagcctcctgagtagctgggattacaggtgcccaccaccatgccctgctaatttttgtatttttagtagagacagagtttcgccatgttggccaggctgttctcaaactcctttaactgtttttttatttttatttttaatttttaaaacatattgtagagataagagtcatgctacattgcccaggctgatctcaaactcctggcttcaagcaatactcctacctcggcctcccaaagcacctggattacaggcatgagccagtgtgcctgaccctgtgtgattattattagcatcctggacactctcaaaagtgttcaggtttggacaatgaactataggatcaccctaattacatgagattaagagtagagaccttgaccaccagaaatggtcaatactcaccatatattttcttcctgatgttagaacctggtacttttgggaaatgaaattgtacatgagatatatgcagaatgggcgaagggagcgaaaagatttaaaaaattaagctcgatttattgagcgcctcgagtgcgctcagtgctgttccaagtgctgacagcagagaggtaagttctgttctccagtgttcacctcacacgtgcaagccaggtttgaaaacacactgtctttccttagtatccctccacccctccatgtgactatacgtatgtatcaagtttgtgatatttcacttctgggcttcttttcatttggaaatttaatgtcagtgtatcatgttttaattaataggacatcatgttatgaaactgttgaatcgaatattttccctaggcatcaaattacttgtcagtggaaatttgacatctagatatgagggacaaaagagatgagaaaaataatagtaaagtgttcctaaaggatgctggtatactgtttaggtattttaatgcactgttacaacctaaagtgtcttgtaaagtatgttctttagaaataaaataaataaaacaagacatctctccataggtacaaatccacttgccttcctcaattcctatccttctgtgatgggaaatctctgctgtgacaaagaaccatgttaagaaaaccataaagttgtattgtttgtagatttttttaatgactaaaggaagatattgcaagtagtagaaacaaatagaggaggtggccctgaaggtcaatataacggagttcactgcagaaaagagaaactactctaggtacgttagacacatatcaaagttttggaaaggctaaagtagcaggttttagacttggcttcgaggacagatttctaaaactatatagaactgatccaataagaaactaccatctccggggtaccactgaagcaatgatttcaagaacatactttgtaaataggaactaggaaccaggaggttgaaatctagacgctaccacttttgaagctgctgttagcaactgcccttctccagccaggaagctggagaaagaactttggaactctgatgtaggaaatctcatgtttctttgactaagctcgccaacagaaatagccaaaaggggcagaaaggtgacctatgcctcacttccactttccagatctctcacaagtatacacatttggcaaaacgttgccagatttagcaaataaaaataatgcatgcaacatacttaacactaaataaaaaaagattgtgtagaaaatttaaatttaactgggtgccttgtattttatctgacaaccctaacttattatatcctaattcataatcagaacactagctgcatggaagtctggcaaatacagtttttaatttccaacctgtccaactggaaggatggtaagtagatttaggtgagccagttcacagtattaaccaaagtagattgcctaccaagaatagctaaagcctttctgcccccagacgcttatgctaccatctgaatatttttactttgcattcttatattcttggaaatcctatcaatctgtgattcagattggtttggtttaactcagcttccccttttttttggagacagggtcataccctgtcacccaggctggagtgcagtggcacaatcatggctcactgcaacttcgacatccctgggctcaggtgatcctccctcccacctcagcctcccaagtggctgggactacaggcacgtgccaccacaccccgctactttttgtattttctgtagaaacagagtttcgccacattgcctaagctggtctcagattcctgggctgaagtgatccacccaccttggcctgacaacgtgctggaattacagatgtgagccaccatgcccagcccctctttttaaaatataaaaatctcccagaatgtgaaagttgtcagtctatactttgggaataagattttcaacagatagaagagaatgaggattaaaacataaggaagtttgggagtagaaaatatgggcaccagaaggtggaaggagagagcagatgcccatttatatatctcctttgttgggtgttggacaaatccaggtcttaaaataggaagtatttcttttccgtacttcttgaatctttcatatcccaaaagatgcatatttcccaaatcatataacccaaagtcatgctatcaaaatgatataaatcatccatggtataggttaaatagctatatatgtatatgctggtctgagacatgtatatgactattgtgtccatggaaatttgagtttggggttctggaccatttatttgcaagtgatttttggttagagaactctttgtaagttggggattgcttttacttattttatgagtaaagatgtcaaaaggatgactgctaaatttgcactgtgttaattcactatttagtgagaagaaatattagactagctatgaaaagtaaaactgcctctccaaaaagtcaaagctgatgaaaaacagtcatacaagcacaatgccgctcttcggaaacatggaaacactttttccttcccaattttccctcagattttctcttccgcatttaaaacacttgggtggttcaagtttctaggctaccactgattgtaacagcaaacagtagcaactggaagcagtgggatgttgggagaagtaatagaggtagctgctacccaagttatcctggaggattttccatggcaatgaaatcaggtagtagaagcttggctaactgagtgtaagcaaacagttctactgagaatggtgttgtcttttcaatccgtttatctgtgatggtgatagtgtgaaacaggggaattttatccaaggtttaaggaaggttatttggttaaaagaggatattgttacagtgaagtcaaactttccattaactttttgctgtaacaacagattgaacgtagcatttcaccgtcaacgagtaaagtgaaatttacagattaacttatgtgcctcttttaaaatatatcagatttctaaattgcttttatttcagaggtatgggaggttcactttctctttgaaagtgtacattatttttctagtgtcttacatctgcctacaaagatgttattttacttgaaagcacagtaactatttgatgagaatttgtcagcatcagtaaattaaagaccctcaaatgatttctactaattatagtttaattccgtacatttaatgatattttaaaacacatgagttatttcataactcccaacatcacaaggataaattttattctacaaacaaaatattgtgctaaatgaaatagttcatttaggcaaagaaaggagcacagaaaattagtggaactctctgctgtaagtaacgtagacattacatggcatattgagtctccatgaatattgtcatgttatgttttaaaaaggtgatcgaacatatggcatttaaaagttccaagtcctcttttaaatgcttcagaatctattatttaatgatcatcttggatctcaaaactgatcttttgaaagattttattcgccccatgtgttaatatgatttccctgtcatatgatatgattatctatcaatacttaaaaccagcagccaagtaaaaaatcagttcatatcatttaatgaatactatgagtcaggatctgggtaggcaagctattttcgggtttgagtagttccaaagcttaaaaatcttatattgattttacagtgaagaagaaatagtcttagctactttggaggtttcaaacattgactactcaaggagtatttccttgctttctcaggcaccaggcagtttttcaggagcaagcattcatccattcagggaattgtaacctgtagtttccacttttctagcaatcacacttaaaaccatgagagtaggccataggacataaggagctcagcttctcagggcaagcacatcctttcagctttcacctgtccgtttgttagtgttcacttccgtgctcaaggagtttcttgttgcctctgagttctaagagacagaacgaagggagaagggtgcagaagtctaacgcatgttcatggacttatctctccaataaagagcttgttttatcttcttttatttatttattttttctaatgaagccattagcctcaaacaaagccatggaatcttatcagagtgaaaccggggtcattccataggctggctgagtgagagctccatggcacgatgatgtatggtcactgcacaacaacgcctttgccacaacacatgtgccttttaattacactttaaatctcatttgaagagatgttatcattatggaaattgctctgtaaatgtgcccaggatgagacccaataaaagtttgctgagaagaattgaagacagaggagatgaatcagcagctaaaacattaccatcagacagaattttcttggctgtaggcaaaacagcccatgcaataacagaaaatcttcattgactcagaggcgtattttccctagattattatggggcactcctgcctgtagcactatcacttctttgataagctgaaggaagcgttctgctctccagctcagcgggcctttttctccccaacctcagagccatcatttgaatttatagttgccaaaatgaataatacagtattgcccttgtgttcctgacttcatgcatgcatgcagagcggggttaaggttctttaaatgaaagattgccttctattcatgcaataaagaacacctctgcttcctttccagggtcatttaaaaataactataccgctgggctatggaaagcacataagaaagattcttagggtaaagtcaaaatgctcttttctctacaacaggcattgtctcatatctttgtgtagcacagctgatttgaagttttcttttaagcacattcttaattatcttttcctttgatcttgaactgtttccctgggctaccagacagagagcctagagccctacctccgctttccccgaggtgcaaactgctccgtccttccacaggcaggcccctggctgaatgcacccttttctccatggttacccacccacctctctgttatttgttacttcccaagtgaatggcaggttaaaatgggaaaaggtcaggttatctgaatgtggttagagtgaaatgaatttcctcattgcacccaagaactgtcctttgacaggtctccttccccaaatcgggtcattttgtacgtaggctcactgggagtaattctaagacaactaaataagtaaaatcacattttggtgccattttccaatgtattcttcttcttgggggttctcctttaaaatggtactggaaggatacgttgtcttcattaatccattgtatgtcccgggggtggaggtggaggtggcagtagcagaagcccgtgaagtaataggtcgtattttgtgtttataaatatttctgcaggtttttgaggagaagatccatcattcttataaaggcattcatgacctccagaagattaagggctgttatgctagaacagtgtttcattcttaaaatggggtctctggactagcagtatcggcatcacttgggaacttctaagaaatgcaaattcttgagttctaccccagacatacagaatcatgatctctcagagtggagcccagcagcctgtgttttaatgagccctctgggtgattctcaagcccactcaagtttgagaaccactgtactaagggaactactgatgcatgatgcaagttcacgctcacaggcacgtgtgaatgacacaaagaacacagacgcctgagagagcaagaaagacaacatagactgtctgactccctgctgggcccttctttaccgcccctatttcaggctaccatgcccatgagtggatgacacgtaccccccgacaaaggtcaacaccactctcccttccacaccctatcactaagtgacaggctaagcctatgttaaactgctcacatctccttggaaattcaacactttaataataggtagcattatcacccccatcttcttctctaagccagaaacccaacttgcctccctatatgttatccttgcattcagtcagtctctaagttgtattcatgatctctcaaaaatatctccctttttctcatcctgtgtctattacctcagtttagatctccatattctcttgcctctaatgttcttgcctctaatgtaccttttcactgccaccaagatgatgttaccaaaaaatcttaaacagattagacatcttcacaggataaagtccaaacccttagcttgatacacaagccccttcacaatccaggccctccttcctgtgcagctatatatatatatatatatatatagagagagagagagagagagagagagagagagagagagaaattttgatcttaccactctgtctctcttcccgccatgggtcttcccctcttccctccggagttacttagctctgatgtgtattcttatctcgtcttatcttcaacttcattcatgtttttcccactgcttcaaatttcactctcccacttctcccctggccagctgctactcatccctcaagaccctgatcaaatatcatcacttgtatgatggcatctgcaaatcttggggggcaaggctaattgttctttgttcccacagggctgtgttccagtttaacatgatcacatgttattttggttcatttatttgcttaagactttttcagaaggctatgggctctttaaaatagagaacttacatcttgtagttttaagagtatttttagtaaaagtttagagtgacccccatctttctgccagcccacaaaaggaaaacatcaaaaagtgaatgtgtaaaaggaagagaactctgacaaaaccaggcagaaaggtttttcagcaagtctttttattttctgttcaggataacattaataattatccacgttggtttctcattctcctgttggtgaatatttttctgctaaatttaaaaccgtatcacaaactcaagcagagatttacaacatttcaacagcttttctacccctgccttagaagggtggatcaaaaacatttgtccatggtaaagcactatggacatgacttagttaacaattctctgtttgggtcaccatgaggcttcttcgtttatactcagggtcagcgacaatgctgatatgcagctacaatttctcatttcttactcagggtgttatgaagcagatttccactgttctttaatcgttattaaaatgtagtccaggtgcagtggctcacgcctataatcccagcactttgggaagctgaggcaggtgggtcacataaggttaggagttcgacaccagcctggccaacatggtgaaaccctgtctctactaaaaataaaaaaactggccgggcatggtggcaggtgcctgtaatcccagctactcaggaggctgaggcaggagaatcgcttgaacccaggagggggacagaggttgcagtgagccgagatcacaccattgcactccagcctgggcgacaagagcaaaactctgtctcaaaaaaaaaaaaaagtcattctcatgtaaaaattcttgtaaaataatctgtaaagtcatcctcttatctgttctagttcttcataagacttatataacatgtcatatgggcatggaaaggcctaagccttcccaaaccttgctcttttggggatgattttccaaatgtacttgttctcagttgaaaagagcattgcggccgggcgcggtggctcaacgcctgtaatcccagcactttgggaggctgaggtgggcagatcacgaggtcaggagatcgagaccatcctggctaacatggtgacaccccgtatctacttaaaatacaaaaaattagccgggcgtggtggcgggcgcctgtagtcccagctacttgggaggctgaggcaggagaatggcgtgaacccgggaggtggagcttgcagtgagccgagatcgcgccactgcactccagcctgggcaacagagcaagactccgtctcaaaaaaaaagaagaagaaaagaacattgcatcatggcacaaggacacaaaaaataccctggacctgcttcagtgagatggtctaagggtctctagcatcttctgaactgaactgaatgctttgggaagaattaatagatacacgatgtatattagttcgtttcacactgctataaagaacttccctgagactggggtaatttatttaaagaaaaagaggtttagttgactcacagttctgtgtggctggggaggcctcaggaaacttataatcatggtggaaagcaaaggggaaggaagcaccttcacaaggcagcaggagagagagagaaagagtgaatgggaagagccccttataaaaccatcaaatctcatgagaactcactcactatcacatgggaaaacagcatgggggaagccacccccatgatccaatcacctcccaccaggttcccccggattacagttctagatgagatttgggtgaggacacaaagccaaaccatatcacaatggaaagctcatgaatgggttctaagaatgaggaaatgtaccttagcattttgcctacttttcctttatgacatttttttcccggcaaatatgccaaatattacctacctttacatcagtgtccacatgcatatcccctgtcttcctccttttcctcatacattaacaaaagagtaactttgttttctccccatcactgttcaccctattgtataagagaagaaaagcaaaataggatgaaagaactatctaggcacacacacaaaagtcacactctccagaagaaagaatttgctctacttggtagtagacagaaattaactcactgaagatcaccagagaatcagatccaattatatcagcaggactttagtttacatcatggtactagaaccttctttaacattcaaaacttatgaatacctagaaatagttttaaggttaatatctctatgctgtgggctaaagagtacccacaaatgaatacagttgtgtctgatgagtgtctgtgattattttggaaattgtcctgctatttaaaatgaaaaaaatagaaatgtcttagattttcctatcattaacctattgtaaacaattacatcagtgtagggttgttttgtggttgcgtgggagtattttgaggtttttagggggtaaagtgggggatagaatgaagttgttgtttgcatttacaaccctaataattaaaacaagccagagggaattacctacatggctgttgtgatttctagtgtatgatcaaaaataattatggcactttgccatatgttcttgctttcttcttagatatgtgttattgggaaaagatgagacttgacatcaactaattgcttttttctaatatacaaccttgaaccacagtgattctctggaggacaaaaaatagcttagtgacaaagagattccagaaataagagcttttcgagcttttaactctctatgtaatatagacaaattgcacagattaatataaccaaatatgtattggtccatgggaagagagttacctatttgaagaataggagtgtattgtgttcatttagaaccattcagaaacatcaatgatattagttctgagttgactaaggataaatttttaaaagcaatacctaattggaaaattattcagttgttgaccattcctatcagtgctctgaaactaaatatctcacagatgccttaatgagttattataattatgttgctgtgatacatgtagcccaagtcagaagtcacttgctttgtatttaatggatggggaagacactggagcttggagggaagagaataaaaataacctagtttcaggaagatctatgctctaaccctgcttctgccacataacaacaactctatgatttgtataagttactttacctctcaaactcgtggtttcctcgataggggataaagaaggcctatttcatagagttggtgtaaaggatttataagggctgtaagtattagttcctgccctgtttcatccccctaccctacccccacccctcatcatggctctgcaaaaacaaatatgtctcagagttggaaagacccatctggtctttctcagataagggtagttttcttcaaacagactgattcctgcacataaaatataatataaaaaaccaaaagtaccttcaacattgtagacttttcatatgtggttgtctctgtgacttaaatgtacaatctagggtttgcatgttaaggtctttcaagattactgttggcactgatctgaaagatgtctcatgcaggaaatgctcacccaattatgagcactgaggctgtatagcaatatcagaaataatattgcagcacagtattttctatggattttagatgcagtattaaaaaaagaaaactcagcctgtctttaagactcgttttctctttcaacaccagaattaaaaggcatgccattcttttttaaagtttatgtgcagagccaaatgaatatcaacattagttctccactgggtccacggcttctttttaaaaatatctgaagcagtgttactctacccactttttctcaggaaattgtgtcctttagaactggcacccatatagtttaggaatgcttgatagggtatattttaggtgggagtcacctgtgcctatatggagctttgatgtcaatgcccttgtcatttggtgtcaatggttttgtcattctaatttatttggccccaaggtgtgtgtgtgtgtgtgtgtgtgtgtgtgtgtgtgtgtgtgtgtgtttgaaacacagcatatgtatttttttcttactccttgagaaatagaactttaaataacatttctatctttaaaatgtacttgtgaatagttatcactttcctgaattctaccttccaaaggtaggacaagagaaggatggaattaaatcacacatgcagctatttttataacttatgagcactcaatgatggtagcatccctcttctttaccttctctctgattctgaagccactgctgttttggttcctgtatggctgggactgcctgtccactagacttcctgccttcactctgaccctgctacatttaccctgaacaccatcctcccaataatcattaccagatgctattttcacaatgttacacctttacacaagaagctacagtggaatattatccttacagaatcagataaaaatctccaggcggcattctaagctctcattggctacactgtaccctttgaacctgaacttcctgagaactacctcttagctcctgcctgtagctctggctcccatcttcatgcagtaggtattcgttttcttttgaacggcctcatatcttctctgctagcaggattggagtcatggcagaaagtgagagggggactagaaggatgcaacattaatgaaacctcacaataggttaggcattgggttaggtacttggttgatctactcacatcatctcatctaatctttgccaaaaccttaaaaggtaggtattatcggccctacttatagacatacaataggtacttaatgcacatttttgtgatgaataaatattcgggaatttttgcattgtgactggatgagaagaaactaggaaaaacaagacgtagatgagaaagatacctctcatcttacttccaacctaggagatcttaaatgaactcatcagttttaaaaggtaatcttaagaatggagtcagagggtcacacaaggagagaaagcatcacgtattaccagagttcgggattgcttaaggcggtttgacagtttcctccgggggtaatccaccctaggccaggcatttttaaagattagattttgaaatgaagctttgcacttgggaatatactgaggcaagaaagcatatcccttctccctgctgagagagcatatcccttctctctgctgttgcagtgcttaagtgtgagaattttcgaatgagatatgaaagcaaagacaacaaaccctgcaggataatagtctctgaggactttaataacagccgtttttaaagcaaagcctgtggactcctaaatccatagctgctcgtttaagatgcaacgcaatgcagtggacctgaaaacatactccttatctacctagagcaaccaggctccaagccaaacagcagtcctcaaattaactcttgtttctcttgggacgacaactctgctgcttttaaaggtgttgcgtggccacatatagaataagaagggaaaaaacagtcacaccctcttgtgagtctgtatccaactgcattttctgatctggttaggaacctccggtggttagattagaatcctgataaggccaagactgtgggtccaatttcttcctatggattcttctcgaaaaacttgttaggaaagatccacttcgggtttttttttttttttttttgcgcttgttttaattcccaatccataatagactgatacttttgtaacatgcaataaaaatgaattattttaaaaattacaaataccagacatacaaaatttaagccgatgctttttatttttagattgctgtacacgtttctaaagatttgctttcaatttctgttcttatgtcttcataatagaatatctgtttctgtgtgtgtatacgtatgagtgtatgcaagtgtgctccaaaagctctactatttagagctcatgtttaatgagtcatgttggataaccagtctaagggagttctactttcatataattgtttttgttttatttttatttaaatcattaacaccttttcaaaacaactgtatcaaataacagtcatttggtcatttgaagcatttacatacactgctttcttcttaaacagattttactgaatgtaaatctgctttccctggctaattcagcatcatcatcctgagcattaactattttgcttcgctataaaacgaggtgatgccttcaagggctactgatgcatggagagctgttagtttccacactgtgtgaccctggtcaattatgcatgcccatggctccttttacacctttctgattctctgtaaggtgtcacttcttcctactctcaatttagccacttaggataatttctttactattttgaattgtatgttcctgaccttctaagttcttagaaatcagaccactttttttcccatcaagctaatttaaattagataaaaattatcagtaaggaggaactaatggccttataattattcatatactaactgctttcagaaaagcttagagataatctgtctataataaaattcttaaggagatttggtcacttattgttattctttctacaccattgtgtttgtttccttacttctcagctatattaaaatggggaagttttcatttgctgagtcctattttagagaccaataattccatttacataggaaaggaaatatgtggatacgattattcatgatgttctagaatagtatcacaaccatctgcttaatggttaataaaatggttaataataaaaagaagggtacagcactaattcttgacatctcccttctttatttttcttctagtaaaacatccataacttttcctattcttccccagttgtattattacttatgaacaccatggatcattctactttttgaatgaaatagtacaaatttaatattcgataatcttgtctttgtacttttctttctaaacttttattctcggtggcttcctaaaggaagactttattctacttggtttaagcagttggtctgcattctacctatttctctcaactctcattgtccattccaatcaggttgtgcaattcattgtccctgctcataaaccaaattcatttcacctttactccattcccatgctattctttttacctggaatattttcttttgttccaatttcccaatcgtatacatccctcaaggctcaagccaagtcctgtaacttcatgaaatctatttctaacatctgatttccacatggattatcttgtaatagtaagccctgcatttgctattatttattaaagatctcttgtgttctagacgctattcaaagtattttacaaaaattccatgtaatattcaaaaaattcagcaggtatgtattattatttcatgtttagtgaaaccaaagtaatgaaagagttttcatcattatgtggctaataagggaaagagaagagaagggtcaaacctatgtctatttaactgcactttgccatgagttttctctggaagctgagaaaggagattcacaacaagagtagatgagactcagataagaaggaagtgtggaatttgaaaaagcccttcagaaaacaggatctcccctactcctaaaactgctatactgtgaacatattgcttgtctcataactgaacttttttggtactctcagctgaaatttgctctataattgtacagaactttaggccaaatgtttcttttatggggacacacattatttgtttcgtttgcacccattttctcaattactttgtgttttctcttgttgtattggatgcatctctatccactgctacaaatctgtttaatagtctttatattaataagaccatgaaattgctctttgtgtgctgacatagttatcctttattttctaatggcagtgctagatttgctaaaatttaggtagtagcattattaataggaaaaactaccaccaacaactaaacttgaaaggtaatatagcctagtggctaagagcacaatccctgaagtctgactgacgaggttctaaatcttgctgcatttattagctgtgtgaacctgggcatttttagttaaccttacagtagtttcattatcttatatggaaaatgaagataatagtagcccctaccctagagggttgttgagaggagaaaatgagctcatgtatatacagtgctttggacagcacctgatgtacagtaaggttcatgtatgttgttgttcttgctgctgctgctgctgctatggtttttgttatgtaacaactaccttttcccctttgttcattcgttattgcttttcctaaagactacaatcacaaaaaagaagaaaaaaattagagagcatacagtgaatgcagtaatgaaggcttgaatgatcttttctagttaagtcagaagtgaaataaaactatccaaaaatttctatgaaaattatcctttgtccagattggctacccactgagaactccacttgattctccatatcaatcttttgctcttttgtgctacctgagtctgaggtgtagtctttaaatgatgagtttattggcacaagacagggatgccctctctcaccactcctattcaacatagtgttggaagttctggccagggcaatcaggcaggagaaggaaataaagggtattcaattaggaaaagaggaagtcaaattgtccctgtttgcagacgacatgattgtatatctagaaaaccccatcgtctcagcccaaaatctccttaagctgataagcaacttcagcaaagtctcaggatacaaaatcaatgtacaaaaatcacaagcattcttatacaccaacaacagacaaacagagagccaaatcatgagtgaactcccattcacaattgcttcaaagagaataaaatacctaggaatgcaacttacaagggatgtgaaggacctcttcaaggagaactacaaaccactgctcaaggaaataaaagaggacacaaacaaatggaagaacattccatgctcatgggtaggaagaatcaatattgtgaaaatggccatactgcccaaggtgatttacagattcaatgccatccccatcaagctaccaatgcctttcttcacagaattggaaaaaactactttaaagttcatatggaaccaaaaaagagcccacatcgccaagtcaatcctgagccaaaagaacaaagctggaggcatcacactagctgacttcaaactatactacaaggctacagtaaccaaaacaacatggtactggtaccaaaacagagatatagatcagtggaacagaacagagccctcagaaataatgccgcatatctacaactatctgatctttaacaaacctgagaaaaacaagcaatggggaaaggattccctatttaataaatggtgctgggaaaactggctagccatatgtagaaagctgaaactggatcccttccttacaccttatacaaaaatcaattcaagatggattaaagacttaaacgttagacctaaaaccataaaaaccctagaagaaaacctaggcattaccattcaggacataggcatgggcaaggacttcatgtctaaaacaccaaaagcaatggcaacaaaagccagaattgacaaatgggatctaattaaactaaagagcttctgcacagcaaaagaaactaccatcagagtgaacaggcaacctacaacatgggagaaaattttcgcaacctactcatctgacaaagggctaatatccagaatctacaatgaactcaaacaaatgtacaagaaaaaaacaaacaaccccatcaaaaagtgggtgaaggacatgaacagacacttctcaaaagaagacatttatgcagccaaaagacacatgaaaaaatgctcaccatcactggccatcagagaaatgcaaatcaaaaccacaatgagataccatctcacaccagttagaatggcaatcatttaaaagtcaggaaacaacaggtgctggagaggatgtggagaaataggaacacttctacactgttggtgggactgtaaactagttcaaccattgtggaagtcagtgtggcgattcctcagggatctagaactagaaataccatttgacccagccatcccattactgggtatatacccaaaggactataaatcatgctgctataaagacacatgcacacgtatgtttattgcggcactattcacaatagcaaagacttggaaccaacccaaatgtccaacagtgatagactggattaagaaaatgtggcacatatacaccatggaatactatgcagccataaaaaaaggatgagttcacatcctttgtagggacatggatgaaattggaaatcattattctcagtaaactatcacaagaacagaacaccaaacaccgcatattctcactcataggtgggaattgaacaatgagaacacatggacacaggaaggggaacatcacactctggggactgttgtggggtggggggaggggggagggatagcattgggagatatacctaatgctagatgatgagttagtgggtgcagcgcaccagcatggcacatgtatacatatgtaactaacctgcacgttgtgcacatgtaccctaaaatttaaagtataataataataataaataaataaataaataaataaaaaatgatgagtttagacaaatatcattatggtagtattatattatgttatgttatattatattatattatattatgtataatgtatattccttgcagcctgccctgcattcccaatctatgactcatgctgccttattgatactgaaaaatctccactacagcatgccagcttttgaaagagagccttgggttctttcccaatacttaccttccttttagggcaacctatctgagtcctgtagcttgaaagatttcctaccagcctgccatcccaaaggaacatggatgaactatgtttatgctgatgtgtcaagtcatttcttggtatggttcatagtagtccacatggctcttgtagacaaagagatgaattactgatggcagaatttctgttctggcaacagggaaatttgcagaaaggagaccttttcagtgtgaacattttttgctcacaggtggtccaggatgcccaatgctaaatgagaagtgaaaagagcaatcagggccaggtgtggtggctcacgcctgtaatccaagcactttgggaggccaaggtgggcggatcacgaggtcaggagatcgagaccatcctggctaacatggtgaaaccctgtttctactaaaaatacaaaaaaaattagccaggcgtggtggcgggcgcctatagtcccagctacttgggaggctgaggcaggagaatggcgtgaacctgggaggcggagcttgcagtgagccaagatcgcgccactgtgctccagcctgggtgacagagcgagactctgtctcaaaaaaaaaaaaaaaaaaagagcagtcagaattcaatttttcattcagaacaaatcaatccacgtgggtaaacattttatcaaactcaagaatgctgtctttcagggtgcttttccctcaacagtcacttatttcctcttgcaagtagtatcttcgttcaggttcagtgactactgtgtattatatccaatgcttctggcaagtgggttggtggaggcagcccaagatcttctagaatcaagagaattggatccatttcccagttctaacacttatcagctatatggcttttaggcaagtcagttaaacatccgagtctcagtgctctcatctgcaaaacagaaaatgtgatgtacttcacagagccagggggaggaataactaaggtggtacatttgtacgtgctttgtaacctgtaaagccctttactgtacacgtgtcatttacagctctgtatcaccatcatgacctagaaaagcagtactgacagaagacttatcttcttgccaatgctaagataactttagccatttctgcatttctaaaggaaggagtctttatcccagtatctatgaagacttggcaggaattgccgtcaatatttagttggtaatataaacgaattaaacaaaaatgcacactaggttttaggaaaattaaagacagaactatcatttgtactcctcttacatttcccaaagtgctaaaactagacaataaatcagtcctcaataaatgcttgtttatcaattttatattcatttatttgttgataatacaacaaagatgtttatatgcagtataatatatatggcaaagatgaaaagtagcaaattcatgaatcaacatcctatttatgcttgagaagacaaagaaagtgttggtgacttcatggtatacataaccttaaggagctcgtgattgagcctgggtctctgctatcaatgtaggatataaatttcaaatgtactatcctttatatgtatgttaatgtagtaaacatagaaaactgatgctactagtgagaatacttttacttgaacaactaaaagtttgtctttaatcccctaagtgcatacacaaaaggaaagtactgtacaaatcaagtacaacagaagaagtaaagtaaaagacaagtgaaggaattatctggaacttagatctggttggctttttctcctgaagtacttagataaattaactcacttttctcttttgctgaagaagtgcaaattaggcaggcatgttattccacgtaggcaaaaggaaaaaagaaagaaaaacataaaatggctatatatttgaccaaacttcgttctgcaagaatcccaatactaaccttctaccatataaactactttcaaaatcaggctatatccttccagtacaaacctggtttgtactactcagagatactactcagaaatactttcagtatttcccttctttcaacttctgatgtgattctatccatattcccctgcctgtctcccagtcaaagagaatgggacacaactctctttagagtccatcagtgatgctttagctgccaaaaatagtgacaatagacattcattgtctgtctaccttacttgttcaacattcagaattctgcatcttaagaggctgtggctgaaaacttgagccagttcttcagaatttctaacatgttatttctgccactttttctcccttactttagcagagtaatttaattcaatttgagagagagagagaaaaaaaaaacttttctagttacacagatcaatccaattgtttggagcttcagaatgaatttttaaacttgttgaacagaagcatacaaatctctaagagcaagtcagataatatacaaagcctccattcattgtgtaggcagaaaggaatgctggtacccggcagctctctgaggaatgttcccttggctttgactattctgctgggaacaaggaaggaaacacatatataaaatgaatttataatgtctctggcttgtaatggcagaatgataagaaaagttggctgtttaatataaactgtcagttgcatattccaggcctcctctctttgaggttcctcccacatccacacgcctggctactgtttagtgcggagtacaaagtggccgtttattattattgactggtgaggcctgtgctccaaaattcattctgtcaacagaatgtaagcaaagttggcattttaaagcagggctctttcagtttctgggttttctcaggattgctatgcaacaggatcagtgctgtagtgcccggttcaagctgaaaatgttacacaggaagacataccatgtaaaggtcagattcttctactataataattttcttgatctgtgtgtatacaagtgaagttgaatgcataacctcttatcataactcttaccaaggtcctatgtactttccacctgtcaagcctaaaaatgtgtattaaatgggaaatcaaaactaataaatgtatgatgctgtactatatgtatgatgctataataccaaggtgaacttaatttgtgttgtcaagaagattttctctcccatgacagactcccaggaatgtgctggtgctgtgggccaagtgcaatcttgtttattagtctctccacgcttttatggtcagagttaactctacagattactacgtaaatagaaaatatgacttgatccatatagtaatgaaattattggcactggggtacactttatcatagaattttattgcctatcacttccataaaataatacattttgtccatagactagaagatataacttgtgaactttataaagttataaatacattactttccaactcataatggcaaggaataaatctattacaactaataagatgcccattttaaatctacataataacaggagaaggcaatacgccaagaaaagggatttgagatgtatcttcttgttagtttagcctgattgaaatgtcttttgaactaataattatttatattttgcaattctccaaattcacattcatcgcttgtttcttttgtttggtaattctgcacatattcttcttcctgctgtcctgtaggacctccaaggtgaaattgaagctcacacagatgtttatcacaacctggatgaaaacagccaaaaaatcctgagatccctggaaggttccgatgatgcagtcctgttacaaagacgtttggataacatgaacttcaagtggagtgaacttcggaaaaagtctctcaacattaggtaggaaaagatgtggagcaaaaaggccacaaatgaattaaaatggccaaattttcctcattgtcttagcacaagtaactggtatctcacatgtctacgtaaatcatccaatttcagaatgattcactgtattttgaataaatgaatcatttatttgcttggtatggagatgatacttgaggattcagattagattaaagtggtaatgttttataaacataggagacatgcatattaagacatcagagtgaatttaaatgaggagtgcagctattctagtttcataaatttctctcttggcatatcacagggttatacaaaaagtgataaaaaattaacggatatgtattatggaattatttttggcattagtctaaatgcataccagaggacagtctttaaaaccctttataacacattacaattatataatataaaacctgtaacacattataattaacagtttagaggagatagctcctacagttaaagagagactatagcaacttcctgtcttttgcttcctctcagattttgttaaaacacatcctctgtaaactaagcttttagttgtagtatactcacatactttatattttgcccccttctatgtgccagctttctttggagaagttagttaatggatgcatcatagcatctttgtaaaaagggcagagggaagttcttgttataccagttttgcaatagttccgtggaggaacaaaaggatagagatagtaagtaaaacgcccattgtaacttaaatgatctagcaagggcggggaatgaaagccaggcttcctgctttctaagcagttgcctttcttaattcatttctctttattaaaaatattttgtgctttcttctgtgtctagagaaaaagtgataatgaagggaggtagaagatgaccaaatggacttaataatagttatgggagtatacactaaatgacgggagtagttactacctctaggtagaaagattacagaagggagattttttttcttctttatagttcttctaacttgtccaaaattttaacatatatacttctataaggaggaaaatctgcatttttagtaattcagaagcactattgtaaatgtctgcatcaagtatgaaataatgatagcaactaatatttacatgatgtacctacataccacgcaatgccataagcactttccattcattgaccggtttaatgctctcagcaaccctaagaggtagattttattattgaattctttttacatttgaagaaagtgaggcacagagaggctaaataatttccttagggtcacttagcaagtggaagatacaagatgaaaacagggagtctgggtgggccaggcgtagtggctcacgcctgtaatcccagcactttgggaggccgaggcaggtggatcacgaggtcaagagatcgagaccatcctggccaacatggtgaaatcccgtctctaccaaaaatacaaaaattagctgggcatggtggcacgcgcctgtagtcccagctactcaggaggctgaggcaggagaatcgcttgaacccgggaggtggaggttgcagtgagccgagatcgcaccacttcactccagcctaggggacagagtgagactctgtctcaaaagaaaaaagaaaaaagtaaaagaaaaagaaatcagggagtctgacttcagagtctgaacttttaaccaccatatgataccgtagcatataaagaaagaaggaaacttctacaaagaaatgcatactaattgaaaggatgaaatagagagtagattttttctaggagtagaaaaggatttgtttttatgagaagtagattgctaggagtagaacaggtttatttttatgtataaggttttgttttgttttgtttttcacaagtttgcaccctggcttcccagacattgttccttatctccctattttgtatatgaattttgtgtcaacttggtggtggtacactgggagcaacaatggcaatagcattttcaaagatagggaggctctattagctttctacagcttaaactcttaagagaggtcagtatgtgtgatgacgtaggccactttgataaccttcgtcattaaaaaagaatgaaaatgtgagatggaaaaaatattggcaggtcaagttaagttattcttttctgcacaaaagaaaaagaaagatgctataattgttccgagtatcacttagtgccttttctctgcctcatgtgaacttgataaaataaaaggagaattgaaagtggcaaatagcatgtcagccaaaatatggactcttcattctcagcagtttcccatgtcagctaccgcagtttgattcttgctgtcattaatcaggtagaaaacagttagcttatctaaggtgctgccaattctagaatttaaatattcagatcaatggttttggcttttatataggcctatgtaataatacaggatatgttataagcactcataaaaagcaaagaagtaattctccacatcaaagcaatttagcttatttcctgacacttgattgaaattagggtattgatcaatctacagcaaatggcagggttcaattgagagaagtacagtataggcagtaattagggatgattatgaaatagaatagaataacactggaagagttagatatagaaccattagtggcactgataaacctgcattatgaatcttgtcacttcttccatgggggttattttaaaatgaaaagttgccacaattaaaaaatagtttcaatgatatactggaaaaataggcctgtgtttgcccaagttataacatattataaaaaattacagttggcccattgtttggtgagcgattctgaaactgctcttatatttcaaaaaaataaaaccattaatgtgtccatttttaaagaaacaaaattgaatttaaatccaaatgatttcgaagtttccctttgtattccattggctcataagagatatccttgtgcttccaaatacaagtccatattgtatcgttttccttccatttatttttcttctgccatacatcttttctcttcctgtgattaagattcttatttaagtcatcatgttatgccatattgatacatttgcaagaatactctaccttggacgctgtttatatcatattactcttttgttcaaagcttcaatcttgtaggtctccatatctccctcattcatttatttgttcattcaacaaatatttaatgaatgcctactatgtactaggcactcttctgggcacggaggatgcaaccatgaataaaacataccaaaaaaaatcactgctctaatgaagttatatttaatcattagaatctagtagaaccttctctctctgccaactgtgcctaataagtccttgctaactccttcccttctcttttctttttctgcctccagttcctttctcaccaagcatcattctgttactccccaacatagattctctgagccaagagaatcaataaattctattttctaaccccattcctactctccaacaatttcctcactctcccatatgagtatgtacccttgctggttctcacacttgcaacattctctttcctcttattctccaaattttgattcatattccataacaaatcttttcttttctggctgtttcctcactaggtcttcccaatactattctaatttacacttgataacatgtttcttcaagtgttcaagagttgctttatagggctatgcttactgcctccagctaacttatatgaatacaaaaatttcaaactcgaaatatgtgagtatggtagagtagaaagacatgggccagcagctgggcaacccagtttcccttctgttctattctgtcactaactgtcttagcatataatcttgatcaagtcacttaactgcttcagacttcaattttctccttcactgaaatgaagagtttgaccagaaatatggacagtctcttccagttctcttgcaatcgtacaattttattcttttagttctgcaatcacactttatgaacctggaaaattgtttaatttttctaccttggttttcttaattaaaatagaactgattgatttaaaaggcattatataaagtaattaagatgtctttgagagaaaagaaatttaattgaaattgtataatcctatctcataatttaattcaagaaaagtatatgctatcattccacatgcattattacatcacatgttggccaagaggtataaggaagaaaagtaagtagtcagtgataatttaagttccatcaaacaaaacgaaaacattaactgctttaagtgggagaaaaagagaaaattatttacttaaatgtacacacacatgcatacacacacagttactgatgacgttatccaatattaagatggtaattagtcaaagaaagtgtttttcattctaaaattccatatccacaatccttgcatttttaattttagaatattaataacttgagaagtggtcaagtcaattgttttacataagaaatatatatgaagatttcaatttagtctactactagattatttttccagatcattgtatatactattaactatgaaaatcacataatatgttatcaacataatttcagcagaatttacattatgtgagatttttatatttggcagaaaaatttgtaaatgttatataaaatgttcacatttatacaattgtgaacattaagaggcaaggacactgacattatatagtctgtagaagccataaatctattggggagtgcttgctattagaggttagaatagttagtgtctttgtataatggagaacaaaagaagggcaaaaagaggtggggtctacctttgagagaaaactgcaacttggacattgaatatctctgaccttctttctctctcttttagaatgttaattatgtttggatgttggagttcaagacctgtctagaaaaaaaaaatgttgacttctctttgggattctctctatttaaagagatagctcccattttaattctgtggttctttaattttttttgtttctgaagtacaaattcaaattattcatctgttgatgacaccctggagatttttctcagtgttctcttgtagtagtttcatggtttgaggtcttacatttaagtctttaatctactttgatttgatttttgtatatggtgagagataggggtctagattcattctgcatatggatatccagtttttccgcaccatttgttgaagagactgtcttttccccactgtatgttcttggcacctttgtcaaaaatgagttaactgtaggtgtgtggattcgtttttgggttctctagtcttttccatgggtctttgtgtctgtttttatggcagtattgtggttctttattatttctgcattcctcccttttctttctgcatgtttaagtgctattttattacatgagggtactaaagatttatagggatatatcattagttttataaaggaagtcaaagtgaaaaatgaattcaatataacacatttcactttaagaatgcatgcctttcagagtaaagttttattaaggatttcaaactaggcattaaccaaatcacagttgaaatatctgtgtctagagaaataacaatcactttatcagcccctataattcttagtgtcctgacactgaggagttccttaaagaccaagcaatatactccagcacatctaaaggctctgcgttttacctaaaccttacaaattgtggaaattatcagctttttagagattagcacttgccttgttaaacggtagtaacccctaagctcttgtcttcactaataaagattaatagacatagatagaagctaagcatgcccctttgaaccacctcttttattttccgttgagtgggtaggagtaagcagaatatatttgacaattagcaatgttaaaagacaaactttagacaaattccgttttgcagagtttatttgagcaaaaaacaattcatgaatcagacagtactcagaattagaagttcagaaagctccacccagcaaggtgggcaggcagtatttatagatagaaaaaggaagtgacatacagaaacagcttgactggttacagcttagaatttgccttacttgggcatagtgtaaataggcatttgccttatatggacatgagctgatcagtttacagcctgtgattagctgaaacttgactgctgggattggctgaggctcagctatttgttacaagaatgtactcttaagttgcatattgcttacatgccaagctgggttgcagtttgctatgtacagagtcagctttaggcccaatttaatttaatttaacagcaacaagcctttttgttcagagatcaaaaacatttggttaaaaccactaaggtttaaggattttctcatctaacaaaggtttgtaatttctatttcccatatctaaataggacagctcaagttatgtttttcagcagctgttttatacctttgcaatcttgatttctacatatgcaaaacaagaaggttgaactataatctctcaggttccttccaaccccaacagcctatgtatgatataaccagaaaaaaaagtcattacaaatacaaagaaacattttcaggaggagatattccacatgcaaacataggttaatcatttcaaaatatctggtatatacactcatgaaaataaaaatagggcaactgcttccgataaatgtattagaaatgtgacttgaaaacatttcacgggcttaacatggtcaaagaaaatgttttgagctcacaatgttccttacatttagatcttcaaaatcaagtcactgacaaatgccacctttgccctgtggagaccaagaagtaatgtttggggcatatcagaaatgctttaataaatgctttatcaaagaatggttctggagcttacctgtggaattgtgaaggttcttgttgaaagcagagattgttgatagaattatagaaagtctggaggtggcacctagcaatctcaattttaaacaagctactcaaatgtttcttatacacactatagtttgagacccagagctttaggttgaatacatttgtatatgctgttttaattcattctctggctgcctttcacctcttcagttcttactcagtgttctctgtcctttgtaagtttttcgcttcagtttttgtcctcctatcacatttttcctttcactcttgagctttaggagaggaaaaaaatgaagcaatttgatatgtagttaggatgatcaaacattctgaaattttatctaactccacagcttagaaaaaaattaaaggaagtccccttacccagatatgtgagagcttttcgtcttttgaggttccaggtccgtcttctgctgctgtattagctctcttgactgtcctctgtccctggcttctaacaacttccctatttcatgctattaagtttctcttagatcctttagaactgaattcccggctgggtgtggtagcttacgcctctactcccaacactttgggaggctgaggcaggtggatcacctgaggtcaagagttcaagaccagcctggccagcatggcgaaaccccatctctactaaaaataccaaaaattagctgggtgtggtggtgggcgcctgtaatcccagccacttgggaggctgatgcaggagaattgcttgaacccgggaggtggaggtgcagtgagccaagatcgtgccattgcactccagcctgggtgatagatcaagactctgtctcaccaaaaaaaaaaaaaaaaaagaactgaattccctaggtctcagttattttgctctctcttaggggacctaaaggggttcattgacccactaataatgagtcagcaccatttaacctagaactggaattttagcacttccttacataaacaaagccgcagcttgaggtcttaacataggcagcctgcccttcactatatcctcctctagacctctctgccacaaggatattttgtttcctctaccaggcagacagaggccaaacattagtcatcgttatattctctcttcccttcctctctccctactccccaatgtatcctagagacttaggggcagtcaataaatatttatttaatcagtgtcttttctaccatttgctgcttttccatgtctgagccctacctctctccacctacttttcaatatgtcctgcttgacagcctcttttcactctcaaagggaccaagctgtgaattccagacaccccaaggaattcgtttaaccattacacattacatgctattaaacagctaaaatcttgcatggggaattgtcgcttaggcttatcatggaaaagtggtaactgaaaggatggtacagaaacataaaagaactgacctctaattgtatgcaatctgcatgcactattatattcaattcatgacatttatggtatttcacgattcagttcttgggaaataatacccttagagtctggaacaatttaatttatcttatttgatggaaatgccttcatttttcctggacatattgtttatactgcaattatagaaagaaaatcttgacaatttggaaaagtagaaagattaagaaataaatcacctgtaaatctacctctgagggataacctggttgtcattacaaaattttttcctagtcaagcatgtgcatacaaatacatacacatacacaaatgttttagaaaaattcaaaaaatgtatttgttttgtaacctgttttctcatttagtaactgggatgatgaccttttccatatccataaatatttggctatgtcatcatattgaaccttgcaaaggattttactgtatgaatgcaccattatatatgtaataattcccttttaaattaagagctatttaattaaattcatatataaatttcattaatttctaaatttaaagcatatacaagtttcattacatttgaaaacaatcagtaggttggggttttgcatttctcaagcaattccctcatattgaatatttaagttgtttctgttttgttttatcaatcataaatgatgctatatataacatttttccacctatatctttgtatctttttccaatttctttgttagtataatttccttgaatttaagcctgtgggtcattgtctttgcacattttaaagacttttatgtattgtcaaattatccttcagaaagtttggaacaatttaatttcagtagataagtattctttggtgattctgtttgactaaggccaaaaggagaattgtatttgtaatgtcaagctaagttaccaaatggctaagggaaatgttgctccacctggttgctttgctttacatttcaatctttgcagcgttaaagtctttattatatttatgttataggtagcgttattatgaattaattagtaattgctgataatagctgagtgattgagcataatttctaatttacctgaagataaagctttgctaacactgcgtttcctctttgttttctggatgatgatttattttattaatttagcttctcatcttcaagtgaaatgtggattttatagcacagatcattcatttgtgtattcttaaatggcttctaaggattaacgtgttctaaatacagttgacggtaaagcactcagtctcctgcctaaattattcatgttcgggggaagctttcagataaatgtctgattttactcttccatgtgagttgttgtcttagtactttttacacaaaggaaacaaagcagaaaatgttgaaacttggtgaagacaaatcccaggtgcacacaaataaagaagggtagggggaaaggagacgcatttgggaagaggagcagaaaggaacagacgccagatggaagaactcaatggaaaaggctgcctagggtgtagaaatggaaaagtcaaaatgtggggagagacctttccatttctcaaggcaaaaagaattccagtactagcatgagtcacatgaaaacgaagtgtttttcattagtcactgcatccaattttttctaccagaaatattaagaattgttgactacaacagtatggaaaagcaatagattccagtgtgtatttcatgccaaaagtctcagcattctgcatgtggaaataaacatatggctaaacactgccttttctcaaaattgccatcaaactatcctctgttttgtggctctcaaaagtaagtagccagatttttattcaagactgctttgtagttcacaataggtttattgtactttttcaatggaattgttagaatcatcaattacacttctagatattctgacatggtacgctgctgttctttttcaggtcccatttggaagccagttctgaccagtggaagcgtctgcacctttctctgcaggaacttctggtgtggctacagctgaaagatgatgaattaagccggcaggcacctattggaggcgactttccagcagttcagaagcagaacgatgtacatagggtaggacatttttaagcctcgtgccttgcacatgttaagcacatagtaatccagtgactattttaaaattaattttgtttgaaattaagttgaatagaaatcttttttactcttctcacccaagggtcaattataaataatctaagccattacactgtaaatgtcaaacacatttgtgttaataataccctttaagaaatcgtccatctcttttggctatataaaaaaaagcttttcatgatgaaaaatattgaacatatacaaaagtagacagaatgctataataaaactcgtactcatcaagacatcaacaattatcaaatcacgtcagatcttatttattctatagctcttcccagattgttttaaaacaaatatcaggcgtgtgttattttattgttaatatttcaaaaggttaaaagataggattcactcttttaaggtaatcaccttgctactataatgcttttgaaatatcaataatttcatcatatcaaatatccagtccatattcaaatttccatttttctcatacatattatgcattttttaaactttttctggttttggtttaaataaaaattgaaatcagacccacaccttactttggttagttggtctttttattactttttgtttggaagtaattacagattcacagtaagtttctaaaatagaatagtttccctgtatctttcaccctgtttcttttcatcattatatgtcatgcaactgtagtacaattcttattgtcatttcaacatgcaatcaatagaaaaaatgtacatttacagcacatctcaattcaggctcattacattccaagtactcagtagccagatgttgccagtagctaccgattgaacagtgcagttctatagtttgattgtatttgggtttggctttttttggcaagactgcttcacaggtgttcgtgtattcttccatcatcaggaggtggtatataatgccttgttttctctttttgtgtgatgtttaatagctgttcacgatcagtggctaggggttgcagtgtgataattgcctatctctaccattccttcttcatttattcactggggtaggtctatgaaaaaaatgttttgcacttgtctcctattttggtactcagtatacctttcataccgaacaagcaaaatacgtttcaattttaccaatttttataataacaacttgttcactagcatcctccaacgatgaccaattatttctttgtttgtttgttttatttttatttacatttctatcttctctactaagctctgagtgaaaaaggcagagattttgtcttgttcacctccaagaccctagagtctagtaaagtgtctggtgtagagtggatactgataagtgttttggaaatgagaataaaagatacaagaacagaaatgaatagcaaaccaaacaaattactaccaaataataaaaacttgataaaatggtaccacttttgtatgttgagcatgtaaaggaaagatctctgtggagatacagccaaaggtggcatcttgaggaaaggtcaagggtttatattattctggagaagaggatataggaaattataaaaagggaagagaacatgaaagaagacccagggatctttgcaaaaaaaaaaaaaaatgccagggaaactgccagtttctcctttagccatttgccttcatatatttctgaatattaaattagcttttgtggtagggtgaaatgtaatggtgctatgtgttttaaatgttctgactttgaataaacagccaaaacactctggtgtacatatagaaaagcactcattgagaaggatgggccttttttaaaaaatgcattatgcgatatagtgaaatgagacagaatttctacaaaagatgaattttatgctagttccagaaaccaaagaaaatgaatcactggacatgtgcactaggagtcaggagactgagattctagtcatatttcttcataagatggattctgattgctattttgttcttcaactgtaatatgaggaaattggtccaaataattgctgtggtttcttccagccagtattttgttataaatactgcttcactattcctggttattagttttggttgcttgttaagagtggtaaaatgtctgtacttaacgcagtccttactcaggaatctcatgacaaagaacatgacttggggagatggtgatgctagagttatgagtgatactcaccagaatgaagttaatccgtccccacttggttagtgtgcttgctcagatagctacctgttaacctttcgtgaatttcacaggacttccagcccattgattactctgtgttttatacattagttcctctgcccttccatatttacctccttccaaatacaacttagattcaatcatctaaattttaataacttgttttcaaaagtctgaaaccctttgcttctttatctttttgttgctgcaatctacaaaactccaaaactctagctaaatattccgagactctaactaaatattttctcataccagacaacaatgtagttgtctggtacagtaccttttccggatgaccagccttcagccttccactaccaagacatcactgggtcaatttttttttttttttttttttgagactgggtcttgctctgtcaccaggctggagttgcaatggcacaatcttggctcactgcaacctccgcctcctggttcaagcaattctcccgcctcagcctcccgagtagctgggactacaggcacgcgccaccatgcccacctaatgtttgtatttttagtagagacagggtttcaccgtgttggccagatggtctcgatctcttgacctcgtgatctgcctgtcttggcctcccaaagtgctgggattacaggcgtgagccaccgcacctggccaatttaccttcaaaattgtttttgactgtctactattgttatcatcataattatagaagaccatttctcctaacctttctgcatctactcttgccaccctacaatgcaatctctacatttcagtcagaataatctgtgtaaaaaacataaatccaattatatcagtccttatcttaacactatagtagtcttctcagtgctcttggaaaaagaccaaaatcctcaacaagggtgacaaggcactatctggcttgtctggcctcagcctcctctttcctagatgctcttcccttgctgtttggatgccagccatactgcctccatttactttttccaattctgcgtgtccctcttatgtggggctttaaatatgttggtcctctgtctcaaacccttttacctatacccacccactcataatatcctggttatcatctaataatcctttacatcttggctcggacattgtgcaaacttttccctgttgtctacatttgaccagatctttctttacacacttctaaaattgtctacttttctataacatagcgttgtttgtcatcacgtacatgtgttactatttgataaatatcgactactcttgctaaaccatgtccttcaagaagatttttgggagggggaaagctgtcatttttctactcagcacattccaaagtgcctagtatacagtagacactggttagataaaggaaggctattgagaccaagagcagggaaagaaagaatagagtggtattcccttcttatttacaggagttttctgtttatttctaattaagcatctttttgtaaagtgtgtagagctactttgatgcacaggtttttttttattattatactttacattctgggatacatgtgcagaaagtgcaggtttgttacataggtatacatgtgccatggtggtttgccacacccatcaacccgtcatctacattaggtatttctcctaatgctatccctcccctagccccccaccccctgacaggccccagtgtgtgatgttcccctccctgtgtccatatgttttcattgtttatctcccacttatgagtgagaccatgcagtgtttggttttcggttcctctgttagtttgctgagaatgatggtttccagcttcatccatgtccctgcaaaggacatgatctcatccttttttatggcttcacagtattccatggtgtacatgtgccacattttcttaatccagtatatcattgatgggcatttgggttggttccacgcctttgctattgtgaatggtgcttcaataaacatacgacatacagcttttacttgtagtttggcgcaatgctttttcaagcttctcttggtatctttaagaaaaattcttgacacaaaacactctccttcctcaaacaacatcatcgctcctgagtgctgatgagagaacagtttagtagcctgtttgactcaaagttttgtcacatgtatgtggtagccctttcatatatggactgtctagttagtgatgctcttgaagcctatgggcaaaagaacaatggaaaatccttgaaactggatctgcgtatcagatctcctgaactcagttagaaaaagagaaaaagaacagaatcagtacaaaattccatcaagatctaatagttgacagatcttatatttgtggacttttgttttactttgccatgtttccagaattgtacattgtattgctctttatgggtttcttgatttaattgttgtttgtatagaatccttggtatcaagatgggtcactgtaattgtaaacttattccgcaagtatttagagtgccacttttttaaaaagtcatctgcttactctctattctaaattattaatatcctttgctgatgctttttatggggatacaaatcccattaaaatgtcaatagttgaaactaaaatcaaatgttgttcattttcactttcattttctataaatcaggatgtttacaaaacaggtaatttgtgtttttctttgtataccatttcagattagtgataatattttgtagcaaaatattacatatcttgtactcttttcttgtagagaaaatatacagtcaatatcaattgctgtcatggagagatatatggttcttctgtaggtaaaattccaagatactccacagacatatttggggaccatagtctcactcctcaaagcaattttcacacccatgggagtagatctgtgctccccaaaccagctgggcagcataacaactgcaactgaatggctctcaagactaattaataaaataatgctccagatgcggtgaagtgttataaataattaaagctcaaatatgccttagcaaatataaactgaccaatttttatgtcttttgaatacattatcctggcttttacagttcctcattacttgcctcactagactgactcgttttcaattagtgggtgttattctggtccagatatattttaaaaactgacttcctttgttttacttgagcagtcactaaagtgatatttattacttgtctacttctgtgattaacctagagagagttttaaaggagcaaatcatagtggggaatttctaaggagaactgcaataaaacatcagcttattcaactcccttcctcctaccccaaatccaaatggagattagatcttgattgtaacaacagtgtaggtaatgactttttgtttgcctttttactaatgaaattgtttgtcactaggttttcatctttcaattaaaaaaatctctataatcccttccctagagatcattaaggataccttcaaagcttcccgagattttctggttaagatttagatggaagtaatcaatacatacattattaaaagagtggacagaaagccattattgcttggatgctgttgacaaatgaaaaggcttgaataaagtagtttacttgttcatttgtcaggtcatatattatgcatgttcgatttcttcagaagtcaccacaaagtgagagacaggctgagaaattcaataaaattatcctgaaatcatgttgtagattatacatttatttaggctcattctgttatcagtgctggcctgcttacgtgggatacattttagtatgtatgttagcttgacgagttttctgtgttttctttttacagaaagagaaaatatctttggatgtcatttgtgaatgttaagatttaagtcagctctgtgttaagaaaaatgcgttgttccctatcacctctgaaaaacaaccaaaagttgcgatagagtgattcattcttttttcttttctttttatttattttttctttaatttttttttgagatggagtctcgcctgcagcccaggctggagtgcagcggtgcgatctcggctcaccgcaagctccacctcctgggttcacgccattctccttctcctgcctcagctgggactacaggcacccaccaccacacctggctaatgttttgtatttttagtagagacggggtttcaccgtgttagccaggatggtctcgatctcctgacctcgtgatccacccgcctcagcctcccaaagtgctgggattacaggcgtgagccaccgcgcccggccagagtgattcattctaacattcaatgacctggcctcttagagtttctaaaccacttgactgttagttatatctactctaaggtgtctttttagccgcgttggaggaaatagacgtctttttgatctattcttcatcatttttgtataagtttgatatcctatgcagtcatatttagggatgctgaatagaaatgacttaaaaattatttttagaactgcatttctaggcatttgagtcttctgaaaactaagtctaagtcttctgaaaactagctttatcatcaaaactgaagaactgagtcatctaggaattgctgctttgctttaatgactgtaacaagatgagatgtgaataatttacaaactgacttctctaccagtcttctctctcactttgtcaaaatattttgatgtcctgacaaatactctttaaaacagtatctgcatagtgttttgccttgacaaagcacttttacacacattattcatttaattacaaatgatccccttgatttttttctgtgctcttccttttgtcccccaaaaacattattttaggaaaaattataccataactcagattcctagaatttattggttctttcaagaactttttttatgaagagcctactctatgttaagcatatgttagggaacaaaatgagtctctgcccctatggatgtttagattttagtgacagaaatacatagtaaacccataaattaatatatgaaattatgttgggtagtaagtgctatgaagagaaaataaacaaagcatgaatagagaaagattgaggagtactggcctatgtgaggaggttattttggggtaaagacttgtgtgaggccgggtgcagtggctcatgcctgtaatcccagcactttgggtggctgaaacaggcagatccctggacgtcaagagttcgaaaccagcctggccaacatagtgaaactacgtttctaccaaaaactagctgggcgtggtgacacgtgcctgtagtcccagctacccaggaggctgaggtaccagaatcgcttgaacttgggaggcggaggttgaagtgaaccaagattgtgccactgcactctagcctgggtggcagagtgagaccctgtctcaaaaaaacaaacaaacaaaacctgtgtgagtgagtaaaccatgcaaaaaccttgaatgaagaggattctaggcagaagaagcaccaaattcaaaagcccaatggtaagaacaggttttgagtgttgtagaaatagcaagatgagctgtgtatctcaagggaaataagatcagtagacagtgataggttctagaaagagggaaaggccagataatgaatggtcttgcaggccatagtttggaggtggattttattctgtgagtaaagagacatcactggaagtaaggaaacatcactggaaggctctcagcagggatgatgtgatctgatttatgtgtttagaagttgactcttgctgctatggagaattgactataaaaagagcgaaactgaagacacagaaaaggagggtggtggagtcatctcagaaggaaatgattacttggactagagtggaaatgataggtatggtgaataattatttgatcgaagatatatttggagggtagaattgatagaacttaagatagatagaatgtggagtttgagaggaagcaaagagtcaaggaaaattctgaggtcaatggcttgaacaaataaaataatgatgttgccatctgagaaagacttgggaatgatcacgtttgagtgtatgtgcttagaatgaaccagggttccatttttggattatgttgatagacagacacaaagggtatgattcagatattatttaccacttatacttgacaatctcaaattttggctcagtatcttgagaacatacacaaattaatttgtcacagggttttctaataatccattcatttctactaacatttcagaagtaatttccaaatcttaaagtttaggcttaatgacctaagacctaattccctaaatggccacgggaactagattgagttttcaccagtgatctctcaaggtcagctcagaacttaacaacattattgtcagtaggaagtaacttccccagtgattgttggaagcagcccagccttagaattaagagtcaaacagctgttcaagatgctgtgtgcgcagtaaactattcctccatagtatcacagacctgcaagcaggctggactattctagcccgtgcccttgatctcagagaatacaatctttgttttcaaagacttccagaaaaataaatctcaacacagagtttgttaaacacattttccccttatacactcaaaaatgttttttcattgactataattagatttttaaaaaaaaaacataatttcaggcctgaaatatgttcatttacttttcaattttacatcaaatttattcaatctcatttataaattaatattgttgttcatgttgttgactatctgaaacaatgaatggatgtatctgatacttcaatcccttatcttcacttttattcagaagtggagtgaaaataaggcggagctttttgtcatcttatttagatgattatttagtcaaactcatagaagcagagagtagaaaaatggttgccatacattgtaagggcgagttgttgctcaatggatataaagtttcagttatgcaagatgaaaaagttctagaggtctgctgcataacattgtgcctatagttaacaataccgatttgtgcacttaaaaatgtgttaaccgaggtccggagatcaagaccatcctggctaacacggtgaaaccccatctctactaaaaatacaaaaaaagaaaaaattagccgggcatggtagcaggcacctgtagtcccagctactcgggaggctgaggcaggagaatggcgtgaacctgggagacggagcttgcagtgagccgagatcgcgcaccactgcactccagcctgagtgacagagcgagactccgtctcaaaaaaaaaaaaaaatgtgttaacagggtaaagttcatattaagtgttcttatctcaataagaaaagatgattatggccttttctttatagcccagatacccatgttcataacttctgtaatactagctgtctcaaatgactattaagggaaacctctctttctgttgtttgctccattgcctctttcttcaaatttttttcttccatgaacccctatgaatttgctttagattactgggggcaatattcttgccaccctgccatgtacatcctggattgcttgcccttttccaagacctcgcttttaagttaactgagcattgcttgtcccgaagtgagcatttggtaaaatattcttatgtgtttgagactcaataaatatggtggctctttaaataaagaaggtccttttggtgacagaatatattcagcaactttcttgtcagacatagaaacaatacaggagacataaaaaataaggtagaaataacacaggaacaagaatgatgacgtaggatggcaaaactagtaaatacagatcaagttacagatatgactgttaacatcttgttctatgcctgctcggtatccatttgttgaatgaacagaactgttggatcatcctacatttcagagcctgtctagtgtcctctcatctcctacctaatcctgcagactacagaaaaagccccaagcagcagttcaaaccatggaacttctgagtgtttggacatgaaaatctcctttaagaaatcactaggttgaagaaggcaatgctaatgggaccacttcttgaggaaattccacccagtaactcagcagtgacactcagctttggatctggaacatgagtagacctagaataagatctgtccatttttcccaatttacagcattaattttttcacttatgattcatgagtccaggctttcccctgcaagcctgttttgcatctaaatcaacttggccttcatataacacactctagtgttctaactgggtgttctgtatcttagtcaacaatgtttactgagcatttactatatgccaagctatggctatggtttttaagcatcgataataacgatgcttagcagagactctcaaactgccaccatagagcaggcctgtggccgattaatgatcttaacaaattgattatagtatatgagaactggatgttagaacttagataaggttttagcaaatgcccacattttacaaatgaggacacagaggagcaggaagagtttatcaccttttctggatcactgcagccaggttctggcccagcccaggcttgaagcccaaggcttctgccactcagaacagtgctcttttcaccacttcagcctgcctcccaggatgattctaggaagttctgcttacaaatatgggtagtatttctagtcattccatcagattttattctgaaaaacacaaatttaccatttcaatatgaatacaggtaaaattcagcgccaggcaagctgtacatgattgaaagacatctgtgttttgaaaagcacgggcttttactcacatccatagtaatatgatcctaaatccactgtccccaggagaaagcaagatagcttttctccctgtcatgtcattacctatgcccagagttctcctcttgttcctctcatgaagcaaatcaatatctcacctttcatcccctccatacgtggttctgagctacttctatttatggcattatttagatatttttataatataagcaggaagcaagagggacagaaaaaaataatcagtggccaggtgtggtggctcacacttgtaatcccagcactttgcgaggccgaggcaaacggatcacctgaggtcaggagtttgagaccagcttgcccaacatagtgaaaccccgtctctactaaaaatacaaaaaattagcagggtgtggtggcgcgtgcctgtagtcccatctactcaggaggctgaggcaggagaatcacttgaacccaggaggcagaggttgcagtaagccgagatcgtgccactgcactccagactgggtgacagagcgagactccgtctcaaaaataaataaataaataaataaaaataataataatcaataacttggttcttctctattactttcaggaattttttaagtttctgatttcttccatggccattaggattttccacttatgtggcttccaaattattctaagtcagggagattttatgttttgttatcactcactttcagcttcactttagaattgcaagatttagattcaaagtgtgtaattaactgatggccttaggtaaaccctaacttatctgtatctcaatttgcatggatgaaacattcataatataaaagtatacaccacaaatatacctactcaaccaaactattggctccttaatgacaaagattaagtctctatatctttcctaactttgtacctaataggttcaaaataaatattttttgaatgaacaaattagtgagtcaacaatcagtcacccggttggccagtacctatggtgttttaagtgcaatctaccagataattcaaccttcataataaatagatttatcttgagattatcattgctataatagtgtagtagcatacttcatataagtttattttgtgaaccttaagaagctcaaggacaaacatctgtgtagtattcctaacattttctaaattgcatattttattttcatagaggtgctctacgtctttagtattgcttctaattctctcatatcactattttggacccttgggtctggctgtcttggaaaggtgaaaagaaaggtatggggaagaggatgtgttttaacaaagataattttatctgttcaagggattcaggaagtaattatcttaacatctgaatgctaacatctgaatattgtaaatacgtattctgtatgtacatgggagaaaatatctatatctgataccttttctatcatcacataaaggaactgacttctctggtttaaaatattaaccaaaatttatatgacaaaatcagtatatatgagtatatattttctcaaacctctttcaaacaggcctttttgggagacaagacacttatcaaaatcaaggctcttgacattaaatattcttgtttgtctttttttaaaaaaaagtcttcatttttctttcttttaaaatgcaataaattatactacaacatgcagtttatggtgagttattagatactgaaaaattggctttccattattttaatgcagattctacattgctttttttttactacataaagccatttgttttaagctccatgctacaaagaccacagatgttcattgcctagaacagtgtctgatacatagtagttgcttgaagtttgttaagtgactaaattaaagaggatcttacatataaccatgtttaaaattacatattgttatttatagtttttcccacatgataagaattattgccattttctttaacctctgacctccttgaaccaactatttctctctttttgtgggagttttatccttttgtatttaatctgaatcttttgaaattctaaagatacaatcacttaaccctctcttccatccactttcttttcttaatttcaggcaacaatgtgaaaataatggtgcttatgtctttgtaataacagaactttctttgtcttttctttggcctcattttaatcttcaatgactcatatttaagaaatgaactgtgcagctgtggtggatctaagtccttggcaacaactcgatgggcaaacacgtggtctctcacaatggatgctccttagctttgaattatttactgtccagttttaacaatggaattatatcatcaaatagtgccttggactttttaagtttttagtgccttaagtttttaagtttgatgagacctttaagatccatttccggccgggcgtggtggctcacgcctgtaatcccagcactttgggaggccaaggcgggcagatcacgaggttgggagatggagaccatcctggctaacacggtgaaaccccgtctctactaaaaatacaaaaaattagctgggcgtggtggcgggcgcctgtagtcccagctactcgggaggctgaggcaggagaatggcatgaacctgggaggtggagcttgcagtgagccgagattgcgccactgcactccagcctgggcgacagagcgagactccatctcaaaaaaaaaaaaaaaaaaaaaaaagatccatttccttattttacagaccttgttccaacaattatctccaccttctgtcaaggtcgtaacatatatctagggtgaccaactttcctcgttttcctgagactgtccaattttcctgaaactattctggttttaacatcgaaagtctctcatcctgaaaaactcaatgctggacaaaccaagatggttggttaccctactgctagcttccgtctttcactctaggttcaaatcattcctatgctaaaaagaacttcttatccctttgtcttgttatcctctctgtcctcctgtcgtgtcttcctcttttccttctcagaaaaagaaaattgaacatttgattttcacttgaaatacctactccttcttccactcactcctcagctatgcctacttctgaggcttctgccctccactgaaattgctctcagcacatctagtgaacactctgcaatgctgatcttactttacttctgtgtttcattggactcacttggtcaccctcttcctctcaaaattctcactctctccttgaaatttctacactcctcatttcccctaatctctccacctatttgttccttttctatctctcaagagatcctgttcctctgtttgcccattaaactttgatatgtaggcactcaacgtatattagctgaatgagaaaataactcctaagtattttttttctcctcaaacctcagaatttattatttccttgtggaaggaatgttagctttccaagctgagcatatcacagtcccttactctgtcccccatgcacagaacaccccccccacacacacacacacacaccatcatgttgcatttttaatattactcttcaataattttatcctgaatgagcatgaggggttctgaatcagaggcagatttcatttaattaccttacagtaaatattgttgctgtgcccttcctttgcccaaagacttacccctagggcaacatgatgaacgctgatgaaacattttcctacttgagtggctgggtactccataagtgggagactaggaaaaatcattttttctgcttataaaggagaaggaggctgctatccatctctcattctgaaaggttctctgtggaaacataacaggcctgagtcctaattccagcttctgcagaaaccagctagccctgtgtgtctcatgttttacaatctggaaatgtctccaaggtatgggcttcatattttttgaaatgtaaatacctagaaagatacccactccagtctttctaacaacatagagttcagcttaggaacctaccctgagctataaccgtttgaccctcttggatcagagaaatgaactagacaaattgctacagatctaatctccatggtgtgggaagtttctcaggaggctagagctttctgtaggtgaactgagacatccaggaaagtttatttcctcatacttagttgaattgcacccagcgtttgctcatctactcaacctagacactaagtgtcattcttgtttctttttctctcttctctccagcatctattcagtcaccaaattttcacacttcagatttttagacatttccctatcctatccctgtcatttttcctggtaccattgccctgagtcaaatcctcataatcttgcactgaattcttacaattgcctcattatctctctgattccatttctgttcttctcaaatacatactctgtatttatatcaggaagatctatttgaagcacacatattcctgtgccactcccttggttaaaaccgttcaaaggttcctgattaccttcaaggcaacacctaagcctcttagtggaccatatgtgatcatagagaggcagagcttcaaattctggtttaaaaatctaatgtatttccagatagcaatagtgtctttttcatctttggacatgccctctccttgttctttatgctctagaaacactggcctgcttgagattccgatacataccatactgcactatgtcctatgactctgcacttgcattttcctcttcttggaatgttctctagcatactcttccttgaataagtcatgttcatgcttttgaattctatgtgattactagcttctcctggaagcttttcccgattttcttccccatattgcgcaagtctatagcactgtctacattgtattgaaattatttacgtgtctgactcttctattatatgttaaatattcctaaatagaaagggctgttttgcattcaactttgtatttccagtttcaggtacaaccactgacacatggtagttcaatagagggagccattattatttttataattagtaatgtcagtattaattgcctcccttcaggtccaaacagagaaactaggcaaaatgataatttacttgaatttgggaaacttaattgtatgaaaaaaaacacaagaatacaacaactgaacacacacacacacacacacacacacacacacacacacacacaaacatggagatttcaagtgaaatatcaggagaatcagctttatatgtaagcagagtaaataactcacgtatctagcatgattttagggtacagaaatatcccattattcagaaagtacttccctatctgtaggctgaatcctaatattctacttacagaactccagtattttggttcaaacgccttccctttctctattgaattgtaaatagctgtggatgatgaatcattttgcaaagtatcagactcaggattcttttgaatggtgaacaccgctaagattttattaataaatgtgtcatacaatacagctctggaacacttctgtaacataatggcatatctgaaattcaaggaagaatactgctaatttgtttttccccagtgaaagaacagggcttaaattcagcaggcaacattgctaaaagacagagttgaaaaaagttacaaaaattaagccctagatcagggcaaatattactgttattgttaaacagttatattagcatttatgtagcatgcacttaatacttttattaataccctcacttctgagatcaaagaatctgggtcaataactctcttcaatggtgtcagagtatccgttaggttattctaggctcacggtatacctcacgatccttttagcactcgattatgtgtgaacttactgttttcactctgcttctagtgttaattttctcccttctttggatctagaaactttttgaaggcagaaactattcattttgtttttctcttgatcccctggataaaggaagattacagattaaagattaattctagatctgttcatttatagaaactagtgtccgcaattcctacatccataatagctcaaaacatttctactattctcaaagaggtcacaatggatgatgtaatgactatttttcaaaagtattgagacttttctcttagcttacctattttataccttgtcagacattttgacagaattaactggtgattgtcagttggattcattgtatactttaatatagcctaaggtcctgcaaatggcccttaaggcttcccattatgttctggatatccactatttggggtatgtttaagtcctcattagccatgctagagttttgcaatatataccttgaaactttagctgtagatttgaagtatggctgtcaggttacataaacaaagcactcttatctcaatgagagggcattaactatccagaatgctccccccatctccccagaatagctttacaaacacagcgctttcctcattaacagatagacccatatagcctttaaaaaaaatcattttataaccatcagtgtataaataaaagagatagaaattgacctgggagtttcataaacaagttctgagcacccaggattaattttgagaagaatgccacaagccaaataagcacttcttttcatctcatttcacaggccttcaagagggaattgaaaactaaagaacctgtaatcatgagtactcttgagactgtacgaatatttctgacagagcagcctttggaaggactagagaaactctaccaggagcccagaggtaattgaatgtggaactataataacatattgatagaaggatcagtggtgacggagcagcccatccattcttgctgccagggtctggatagctctcatattttcttggttaaatagaatcaattcaaattaaacatagatgctgaaaaaaaaataaggactcataaactaccatgcataaatcagtttgtgcattcataaataaacatcaaaagagattagcaatcagttattggaacatttagaaaataataaacaaagggagttatctgtgaggaggaattctattgttgcaaagactacaagttaattttccatttaagagcctgcctgaagtaaattagagcttgtggtatgcatcctaacgtttttctcctcaatagcttaagtgaatcttaaattgtcggattgatataaggtagaaactcaggaagatatactttagatgttctgggctgtatcaaaatttatgccaaagtataaaaaagccgttaatcagtaggttaccctcttgttcaactgtactctttctttcttccagtatgacctttttgacaatgtttaaaaaaaaagaatgtggcctaaaaccttgtcatattgccaatttagagctgcctcctgaggagagagcccagaatgtcactcggcttctacgaaagcaggctgaggaggtcaatactgagtgggaaaaattgaacctgcactccgctgactggcagagaaaaatagatgagacccttgaaagactccgggaacttcaagaggccacggatgagctggacctcaagctgcgccaagctgaggtgatcaagggatcctggcagcccgtgggcgatctcctcattgactctctccaagatcacctcgagaaagtcaaggtaccgtctacttctttgcttcagggccctttgagagactcaaaagagcttctaatctgaacttgagtgcagtgttatcttcccacaaagttaaagctagagaaatcagtccgtctttcacaaattcagtcttcattcacatggtattttctccaagagaagacagtgatctaattatttgtctgtcttcagttatatgaaatgaaatattaaaacagttacagggcaagaaatcactttgactttgatattaagtgattgtactaaagtctgatgtgtgtgtgtgtgtgtgtgtgtgtgtgtgtgtgtattggtgtattgcttgtgttacttagtatcagaatacagaaaaataaaacacttaatcaaaagccaggagtctaggtgttggcccttttgctaaccaaattacatgacttgggtaagttatggtttggtgaaataaggctgttaatgtgttgcccttcccttggaaggcaacatttgtaatacagtttcaagtttcattggcccactgcagaaatgagggaaaatcattatatatttggaagaccactgtctataagaccaaagttaaattcccttgtggcacaaagatggcaaatatattctgtagaaaaaaatacatatttaggagtatcattttgaaatcagcaactactcatctattgtcaaaatcacaaaaatcctcctagattaaaattcaaaagaagttaaattccctcatgcactcagcatgtttgccagcatctcagcatcctcattctagaagttgtcctcttccttggctttcatggaactgttccatccatgttcttcttcctatatttttctagattcttctcctagccacccctcaaatactgttgtgcccaagtttctaaccttagcctaattctcttttgattgtttaaaccctccctgtttgagatggcctggatggtgatgtatctacatctctagtccgcatctctcttctgatctctgaatccatgtggcattacgatcacaaatgcaactattctgaaaccaagttcatttgttctcctgttttccatttccctacttctgtcccctcttatctgaccttttttttcctgtttcctatttcagttaatgaatcatcatccaacaaattttccaggctagaaactttaggttcatccttaaacccttctgcattttcactgatggcacatgatggctcatgttacctcagaatagctcttttgtgttttctctcctcttttaaccaatgtcctttttaatccccagcatcttttacttagatgataacagtatacatctttaaatcccattcacccctctgtgtgcctggcatatctcagatactgcattttaaacatttggtgaattaatggatggatgaatggtttctttgctgatgttcctgcattacccagcttcttccaattccaatccaaactccttgcgggagaatacttgcctagagaatgaaatccaatgaataaggagattacgtggcccttttcttcctagccttgacttaccttctcagccatagctcctattctccagaccatttaatacactctgcccatatgatatatatatatatgtgatggcatatttgggaaaaaggggtgatatgggcagagtgtattgaatgtgtgtgtctgtaaagtatgtgtgtgtgtgtgtgtatatatatatatatatatatatacacacacacacatacatagttagatatatacatagtatatatacatatatacatagatatacacatatatatacacatagatatagatatagatatatctgcctttgcaaatgctgttctctctgtctggatccccctacgttgtctacttggcgaattctccttcagccctcaaggaccagccaaaatgttacctatctttgttgtctttcctgagtgtctacaacccccaactcccaccaagcagaagaaactgcttacagttggtactctcatagatcaccaagcatgctaaattgtcacacttaaatttcacatatattgtagcaacttgcttatgcatttttttttctcccagagaaagtgaagttgctaagagcaaggatcatgctgtacatctttgggctgctagcccagggccagcaacatatgaggaatctcattaggtaccttcatttattcactcaacaactgtttatgagtcattatataatgtgctggacaggtagttataaaagaaacagacttgatcattgccttcatgaagcctatggtctaatgttgaattgcatagctcttcattaaaatagtaggtaaaatttttaaaaagaaaagattaaaaatttgactctaatacttgtaaaatcccttctaccccaatgttttatgaccccatgtctaacatttaaagtaagggttaaccttgctgtgtactggaaaactaagggttttgaaatgtattacctagtattttaaaagcattaaatatgttgattttattcaaaaatatagggactaattttttgacagacttctccaaaaatgagaaataagttaggaaaatgtcccagtggaactaaattagttaatatgtcaattaaattgctcaatagataggctgtagagcagacataagggattcatttttagccatacttgtcacacaggtgcatttgtaagatactgagtatggatggagaagagaatgtgtacagcataatttaataattaaaaataactaaaagcataacagttcaagtatcagctggccttcacccaaccctatttgcggtattccttttagtttccctgtcttatctgttcttggtcttaagacaaacttcattttccataccctgattggtaaaactctcattctgatcccaatgatagcaaaacatataaacattaaacatacctttcgaaaaattatatttataacccagcacatctatctttctcagacatatatacacttaagttatggtacttatctgaatttttatgtactggtaatagtagatgtgattgggcttttgaatctgtgttgtattttatgcgtgtttcaaactatgaattacatgaattcatatatatttatctcccttcggtagctcttctttaattttgcagtggaaataaatcatttttctccactgcatcttattgacactgggtttgaaactctgaagctttgggggtagtagtttacaaagaatgagttttattaactaaaatttatttcagaaaaaaagtagaagtgtacttgaaaccactcttcccatttttccactcagcaatttaagccctcagaggattcatgctgtagggaacttttctaataaaccatggtttctctttttttattttattttattttattttattttattttattttattttttttttgcgacagtctcgctctgtcacccaggctggagtgcagtggtgctatctcggctcactgcaacctccacctcctgggctcaagcagttctccgcctcagcctcccaaatagctgggactacaggcgcccaccaccatgcccagctatttttttttttttgtattttttagtagagatggggtttcaccatgttggccaggctagtctcgaacttctgacctcaggtgatccactcaccttggcctcccaaagtggattacagcactgataactaggcagctagctagaagaacattttatatatccatatcagttcattttccttacccctagacactctatcatagtaccccccctccattctgatcttatgtgttaaataacttgttattcaagaaactaagtaatatgtgtttctgtgagatttagcattctgtaattgtattagcaaatgtggcttttggatttaaagaatgggtgaaacaacaatgactaagtccctggcctttatggaaatggcattattgctagctgatcatctgcgggtggtgaacatggtaaattaataaatggaaacacaatattaatattgactatattgctcactaagagaatctcagccttccaaacatagcttccataggaaaaaacagtagaatcaaatttaagttttaaatgcttctttacttttaaaattcatgatttatactgcttatcaaatattttaagggcaagatcatgacttttcactttactgaaaatagcaccagtgcttatttgactagacaaatattctaccttccttgtaatggggaataggaataactttttgaattactaggtgttccacatagatctgtaagtggaatatataaaggctttaataaagtagaataacttttaaacctgtagtctggatacaagatttttgttcttcaggacaatcccaaggtgaaaaggtttgtggattgttgttttctttttttttttttttttgagacagagtctcactctgtcaccaggctggagtgcagtggtgagatctcggctcgctgaacctcctgggttcaagcaattctcctgcctcagcctcctgagtagctgggactacaggcgcgcaccaccacgcccagctgatttttgtaattttagtagagacggggtttcaccatgttggccaggatggtcttgatctcttgatctcgtgatccgcccaccttggcctcccaaagtgctgggattacaggcgtgagccaccgctcccggccagattgctgttttttaatgttttgtttttgttttaataaaccatggtttctctttttttaatttttttttttttgagacagtctcactctgtcacccaggctggagtgcagtggtgctgtctcggctcactgcaacctccgcctcctgggttcaagcaattctctgcctcagcctcctgagtagctgggattacagacatgtgccaccacgcctggctaattttttttttttttttggattttttagtagagatggggtttcaccacgttggccaggctggtctcgaacttctgacctcaggtgatccgttcaccttggcctcccaaagtgctgggattacaggcgtgagccactgcgcccagactataaaccatagtttctctgtaccaaaagtggtatgtccttcttgagccaggaatatttcactgttcttagtttacctgttgactctgaacacagtttttcatacactgtaaataactctcccaggctgccatcttggaatatgcaaatctgtcgcatctatgtagttatgcatatcgcatttttgtcaaacttttaacttgcatttcttactgtgaaaagtcagggcagggattctatgagttttttctttaaagttcctacaatgaaatgttttgattaaaccttttttggcattcaaattgagattgatttaatgatgtgtgtagtaggctagaaattatgatgaagtgacgatgccatccttatttatcttcagcattcacatctaaagttttaagaagaaaactggcaaatccacctttttaggcttaccatcctcagtccctgtggctttgggtttttttgagaaatttgtcaaagaaacgctatgttagaatttgacattgaggaagccaagcatatttcctctgaatagataatgtgaaatgtgatataatgtattagaatttcatcttcactttggcaagcaagatacttgcaaccatgttcatgcaactatcttcccttattgcttttctcttcttaaccttggttctaaagttttcttcttattgtattaattttgttatgcttcccatttatatgagtcaagtcaaccttacttgatttcttatatatgagttatgtaaggaaaacttatcttttcttatagaattaggggatgaatgagcagatagaaccaacatgaacagggcgatcctaaaaatcattcaaaacatgtaagctctcccaactctgaataaacttgtgatatcttcataatgaataaggtatactgcctatagtaggaagaggaaaatttattaatgttttgtgcattgttaaagaactacaaatgaattgccgtgtggaggctttcattgttgttgttgtaaaaatgctatgtgtattaagtaagcctttgatggagaagaaaaaacaaagaaaaaatatttaatccttcataaatctgggttaaatatgaagctaattcctgttatttggagtaaccagggttttatctagtttacaaagcatgcaattgcaatgtttaaaagcatatgatttggcctttaatatctgaaaatatgtctatcaaaggccatattatagcgagtgtcactccatactttataagtacggtatatttttaatagaatgtttatgtactggtgataagagatgttactgggtttctaaaccagtactgtattaaggattttatgctattgtaagattatggattatgtgaattcatatatattgatttactttcagtagcttttcaatagaatatctagggtttaatacagcttagaaactaaagcaggaattattcatctttaaaatcctgaccaaagaagtggctggcaagatggctgaataggaacagctcaggtgcgcagcccctagtgagatcaacacagaaggtgggtgatttctgcatttccaactgcagtacccggctcatctcactgggactggttagacagtgggtgcagcccacagagggcgcagaagcacggtgggatgtcgcctcaccccggaagcacaaggggtcagggaattccctcccctagccaacagaagccgtgagggactgtgccctgaggaacggagcattccagcccagacactatgcttttcccacagcctccgcaacatgcagaccaggagattccctcgggtgcctacgccaccagggccctgggtttcaagcacaaaattgggcagctgtttgggcagacaccgagctagctgcaggcgtttttttcatatcccagcgtcacctggaacaccagcgagatagaaccattcactcccctggaaaggggactgaagtcagggagccaagtggtctagctcagtggatcccacccccaacggagcccagccagctaagatccactggcttgaaattctcgctgccagcacagcagtctgaagtggacctgggatactcaagcttagtgtggggaggggcacctgccattactgaagcttgagtaggcagttttcccctcacagtgtaaacaaagccgtcaagaagttctaactgggcggagctcaccgcagctcggcaaagccactgtagccagattgcctctctagattccttctctctgggcagggcatctctgaaagaaaggcagcagccccagtcaggggcttatagataaaactcccatctccctgggacagagcaccacggggaaggggcagctgtgggtgcagcatcagcagacttaaacgttcctgcctgctggctctgaagagagcagcagatctcccagcacagcactcgagctctgctaagggacagactgccttctcaagtggggtcctgacccccgtgcctcctgactgggagacacctcccagcaggggttgacagacaccctcatacaggagagctctggctggcatctggcaggtgcccctctgggatgaagcttccagaggaaggaacagacagcaatctttgctgttctgcagcttctgctggtgatactcaggcaaacagggtctggagtggacctccagcaaattccagcagacctgcagcagagggttcctgactgctagcatcaacatcaacaaaaaggacgtccacacaaaaaccccatctgaaggtcaccaacatcaaagaccaaaggtagataaatccacgaagatgaggaaaaaccagcacaaaaagcctgaaaattccaaaaaccggaacgcctcttctcctccaaatgatcacaactcctctccagcaagggaacaaaactggatggagaatgagtttgacgaattgacggaagtaggcttcagaaggtgggtaataacaaactcttacgagctaaaggagcgtgttctaacccaatgcaaggaagctaagaaccttaaaaaaaaggttagaggaattgctaactagaataaccagtttagagaggaacataaatgacctgaaggagctgagaaacacagcacgagaactttgtgaagcatacacaagtatcaatagccaaatcgaccaagcaaaagaaaggatatcagagactgaagatcaacttaatgaaataaagcatgaagagaagattactgaaaaaagaatgaaaaggaacaaacaaagccttcaagaaatatgggacgatgtgaaaagaccaaacctacatttgattggtgtacctgaaagtgatggggagaatggaaccaagttggaaaacactcttcaggttattatccaggagaacttccccaacctagcaagacaggccaacattcaaattcaggaaatatggagaacaccacaaagatactccttgagaagagcaacccaagacacataataatcggattcaccaaggttgaaatgaaggaaaaaatgttaagggcagccagagagaaaggtcaggctaccccaaaggaaagcccatcagactaacagcggatcatttggcagaaaccctacaagccagaagagagtgggggccaatattcaacattcttaaagaaaagaattttcaacccagaatttcatatccagccaaactaagcttcataagcaaagtagaaataaaatcctttacagacaagcaaatgctgagagattttgtcaccaccaggcctgccttacaagagcttctaatgaaggaagcactaaatatggaaaggaaaaactggtaccagccatggtaaaaacataacaaattgtaaagaccatcacactatgaagaaactgcatcaactaacgggcaaagtaaccagctagcatcataatgacaggatcaaattcacacataacaatattaaccttaaatgtaaacaggctaaatgccccaattaaaagacacagactggcaaattggataaagactcaagacccatcagtgtgctgtattcagaagacccacctcatgtgcagagacacacataggctcaaaataaagggatcgatgaatatttaccaagcagcaaatggaaagaaaaaaaaagcaggggttgcaatcctagtctcagacaaaacagactttaaaccaataaagatcaaaaaggacaaaaaaaatggtattacataatggtaaagtgatcaatgcaacaagaagagctaactatcctaaatatatatgcacccaatataggagcacccggattcataaagtaagttcttagagacctacaaagagacatagatgcccatacaataatagtgggagattttaacaccccactgtcaatattagacggatcaacgaaacagaaaattaacaaggatattcaggacttaaactcagctctggaccaagtggacttaatagacatctacagaactccccaccccaaatcaacagaatatacattattctcagcaccacatcacacttattataaaattgaccacataattggaagtaaaacactcctcagcaaatgcaaaaaaacagaaatcataagagtctctcagaccacagtacaatcaaattagaactcaggattaagaaactcactcaaaaccacacaactacatggaaactgagcaacctgctcctgaatgactgctggataaataaggaaattaaggcagaaatgaataagttctttcaaaccaatgagaataaatacacaacggaccagaatctctgggacacagctaaagcagtatttagagggaaatttacagcattaaaatccccacaggagaaagcaggaaatatctaaaattgacaccttaacatcacaattaaaagaagtagagaagcaagagcaaacaaattccaaagctagcagaagagaagaaataactacgatcagagcagaactgaaggagatagagacatgagaaatccttcaaaaaatcaatgaagccaggggctggttttttgaaaagattaacaaaatagatagactgctagccagactaataaagaagaaaagagagaagaatcagacagacacaagaaaaaatgataaaggggatattagctctcatcccacagaaatacaaactaccatcagagaatactataaacacctctacgcaaataaactagaaaatctagaagaaattgattaatttctggacacatacaccctcccaagactaaaccaggaagaaatcgaatccctgaatagaccaataacgagttctgaaattgaggcagtaattaatagcctaccaaccaaaaaaagcccaggaacagatggattcacagctgaattctaccagaggtacaaagaggagctggtaccattccttctgaaactattctaaacaataggaaaagagggactcctccctaactctttttatgaggccagcatcatcctgataccaaaacctggcagagacacaacagacaaagaaaatttcaggccaatatccctgatgaacatcaatgcgaaaatcctcaataaaatactggcaaaccgaatccagcagcacatgaaaaagcttatccagcatgatcaagttggcttcatccctgggatgccaggctggttcaacatacagaaatcaataaacataatccatcacttaaacagaaccaatgacaaaaaccacatgattatctcaatagaagcggaaaaggccttcaataaaattcaacaccccttcatgctaaaaactctcaataaattaggtactgatggaacgtatctcaaaataataagagctacttatgacaaacccacagccattatcatactgaatgggcaaaagctggaagcactccctttaaaaaccggcacaagacaaggatgccctctcccaccactcgtattcaacataatattggaagttttggccaggacaatcaggcaagggaaagaaataaagggtattcaaataggaagagaggaagtcagattgtctctgtttgcagctgacatgattgtatatttagaaaaccccatcgtctcaacccaaaatcttcttaagctgataagcaacttcagcaaagtctcaggatacaaaatcaatgtggaaaaatagtaagcattcctatacgccaataatagacaaagagagtgccaaatcatgagtgaattcccattcacaattgcttcaaagagaataaaatacctaggaatacaacttagaagggatgtgaaagacctcttcaaggagaactacaaaccactgctcaaggaaatgagagaggacaccacaaacaaatggaagaacattccatgctcatggataggaagaatcaatatcgtgaaaatggccatactgtccaaagtaatttatagattcaatgcagtctccatcaagctaccattgactttcttcacataattagaaaaactactttaaatttcatatggaaccaaaaaagagcccacatagccaagtcaatcctaagcaaaaagaacaaagctggaggcatcatgctacctgacttcaaactatactacaaggcttcagtaaccaaaacagtatggtattggtaccaaaacagatatatagaccaatggaacagaggcctcagaaataatgccacacatctacaaccatctgatctttgacaaacctgacaaaaacaagcaatggagaaaggattccctattcagtaaatggtgctgggtaaaccggctagccatctacagaaaactgaaactggaccccttccttacaccttatacaaaaattaactcaagacttaaacataaaacctaaaaccataaaaaccctagaagaaaacctaggcaataccattcaggatataggcatgggcaaagacttcacgactaaaacaccaaaagcaatggcaacaaaagccaaaattgacaaatggaatctaattaaactaaagagcttctgcacagcaaaagaaactatcatcagagtgaacaagcaacctacagaatgggagaaaatgtttgccatctattcatctgacaaagggctgatatccagaatctacaaggaacttaaacaaatttacaagaaaaaacctaatcaaaaattgggcaaaggatatgaacagacacttctcaaagtaagacatttatgcggccaacaaacatgaaaaaaagctcatcatcactggtgattagagaaatgcaaatcaaaacacaccagttacaatggcgatcattaaaaagtcaggaaacatcaggtgctggggaagatgtggagaaataggtgtgcttttacactgttggtgggagtgtaaattagttcaaccattgtggaagacagtgtggcaattcctcaaggatctagaaccagaagtaccatttgatccagcaatcccattactggttatatacccaaaggattataaatcattctactataaagacacatgcacatgtatgtttgttgcagcactgttcacaatagcaaagacttggaaccaacccaaatgctcatcaatgatagactggataaagaaaacgtggcacagatacaccatggaatactatgcagccataagaaaggatgagttcatgtccttggcagggacatggatgaagctggaagccatcaatctcagcaaactaacacaggaacagaaaaccaggcaccgcatgttctcactcgtaagtgggagttgaacaacgagagcccatggacacagggacgggaacatcacacaccggggcctgtcgaggggtgggaggttaggggagggatagcagtaagagaaatacctaatgtagatgacaggttgatgggtgcagcaaaccaccatggcatgtgtatacctatgtaacaaacctgcacgttctgcacatgtatcccagaacttaaagtataataataataaaaaaaaaatcctgaccaaattatttattcaatgtgaaattaattgtaagttagtgttgccaggagagcttattacttagttaccatgtattccctctcatctcctgctttgtttataaagctaaaagcaaattacttaggacagcaatgtcaaatcactttctttccccaaagcatctgattttagatagcgctgtgtgtgttttaaaagcccctacctcgacttaggcaaacagaaccttcgtttaccatgctattcccatcccgcctttgaaacttctgaaaaggcagagcggagtaattgtttcagacatctgcttagcatactttgaagtgcatataagttctttttcagtttcatttgaaccccagctgtcttcaccgaagtctataatcaatctgaattaagttgtcctacttctcctaataagtctcttattaagttctgcatcagcctcttagggagacttaaaagctaattcatgtagaattgccattttctactaattcacttgtcagctctccaaattccaacaaaaacaattgcaaagactattaatttggctcttcataaacaacttatgtaagtgtagtatacattggaaccaaacaaacgatttaaaacagtgggtgggaggaaatgagttgatggcattcaaaacgcttccttttttgactgttatgaaatgccttccacatcgaaagcataaagccatttatttaataagggaaacatccttctgcttttactttcatagatgagataatgactgaatgaactttgcttaaagacaggaaaaggctttagaacagttggaaaaggaacatgttctttttgtcattgaacttattttaatttggacttctttgtgttattttgatggactgtgataaaagaaggagctagaattggttattattgttattggattaaatcagagttgtacagctactcttctggtcatgggatatttaggagaacacgggtaatcaaaatgttcagctaatgagttcatctgattctactcaagaagtgtttaatcagataataaaaatttctccaaataataccatccttcctactatttgaaaacaaccatatcaacatctgatcctataatatgccaatcctgtttgctaggattttctgaaagctttgtttgtggtgggtaataactagaaatactattcctcaagagtctcgggtaataaaagattattcaaaaaacttaagtaatatactctcagtattagaggatatacaaatgcactcattcattaattcatgatatgattgaaacctatacccagagaagtctgatctcattatagagtgtgaacatttaatttatttcaaaaacaaaaattatattgagagttgtatagatggcatcttagttttcctgggaatattattatttagcaccaagctgagggagcaagaatttgtattagcttgtgtatacatgtgcatgtaccacattaactagaaacagtgctaaaatgtgagttatttatttaactgaaattccatatttcctaagaaaatggaatcacacagccaatatatatttttaattattttttgacatctaccaaagttgtgacaagaataaagttcacaattctgttactctcctaccgttcagtaaaacaggaaatgctttaagatcaaataacccaaggagttcgcttcttcctgtcatgcttgacaattacaattttcaaaatttaacagttagcattgacaccagtattatgccttacacaacctgaaattaactaagttaagtaatggcattgaataatttttcttggtaaatcagttttctgggtattatgggaacagttgtgtctgtgatactaatgtctctctcattttaatggggcctaagaaagaactttttcataataagattttttcatgttaaaataatatttttagttatagtttacacttactgcaggtttttctatttaaaagcatcttccgagagcagtgattcttaaacttatttacttcagttatcttaacagcatagaagacatagcctgacatctcccgcttccacttacctatctcctttttccatgagcatgaaatttctttgatgttcttgttttattttttaaatctcacatcaattttatggtattttccataatggattcatcatgttttaatatgaagatgctttttcttcaaattctgaagtaaggaatctttcagcacattcacctatggacatgaaagcgtaagttgagaatcacagtataaaggattgcccagtttttgcaggctttatctttttccatcaacttctgtcttttatgtacacagacaaaaagagcagacccttgctatttcaaatttatcttttgcaggttcatctgattattgtgatccaaagttccatgactagcagctcttaattttgaacatgtattatttcaagcttttgtgcatagtcacttaactaatgagttaaatggcattttaagtcaggttccatgaacgcagaccctgagaacaggggtctaggtgcctgtgatttatagagggtctgctctcaggagaagcctgtattggagttagggaaacaatacaggagaagaaagagcccagcaagtatgccatttcaggtgaaacctcacattgtgtctgatccagagagagagcaagccctcgagcagaaacctcgctgtggagttgtactctttattttattttatttttttgagatggagtttcgctcttgttgcccaggctggagtgcaatctcagctcactgcaacctccgcctcccaggttcaagtgattctcctgcctcagcctcctgagtagctgggattacaggcatgcaccgccacgcctggctaatttttgtgtttttagtagagatggggtttcaccatgttagtcaggctggtcttgaactcctgacctcaggtgatctgcccacctcagcctcccaaagtgctgggattacaggcgtaagccacaacaccgagccggagttgtgcctttataccagtcattgtctgtgtcactgaagtgctggcaaatatttgtcgactagctctgaggtgggatgaatcctggtgtgtatcaaaaccagttttcgtggtgtaaatactccctctaccactgatctccagctaccgacataatgccactgagtatggaattgggaggagatgcacacaattggctcttgggctctgctgcagcacaccactggctgtggtccactcctgggatatgggttacttcctgggctagggggctcccataagcagaggtcacatgtggagaaggcaggtagctataagacattaatagtcaaccatcacagcagctgaaggatggatgcccaggttaggtaaagtgtcccctgcaactaataagtaaacctagtaatccactcactcttcatattcaacttggctttttttaatgctgttttgtttttgcatgtacagtaattctttataaataatgagaattttgtttctttatggaaaatccacctaccctccaccctaccatgaatagcttgatagctgttcatcagaattagtgatggaagagaagagttaatgaatgaaaaagtctaagaaagtgatcactattagtaagaaaatggcctcataagtgagtttggctttatagttatggaatctgtaaatgtctaggcattcagacatgtccagacatcattgagaatgtcaagaattttcagtggcaatggttctcacctcagcatacatcagaatcacctggagggcttgtagaaactcaggttggtgaaccccttccccagagttcctgattcaaaatgtctggggcaaggctaagaagtcccaacttgttcccaggtgttcatgatgctgctggttcagagatacattctgagaaccaatattccatagtaaagctactgtgtatgtacctgaagacatattttgtgtagtgttagcgtttcttcaattacaagtaataaatatatcatttattatttcttttatatttatcaatatccagaagatttagtttaaaaatgaatgcaggcacacagcctcttgttggattgattaatagtttagatatgggagcatcatagggagcattgtttcgcttaggaaccttgaaatgaataaatggcttcttttctaaatctcacttgtggaagactttgacggtggtttatttcattttttcctgttggtattttaatgacactggtacaattttggggttgcttcagatgaccaacagcataacttgccttcccagtattaatttttaacgttaaaaatatttagtcatggccggccgtggtggctcacgcctgtaatcccagcactttgggaggccgaggtgggtgggttgcatgagctcaggagtttaagaccagcctggacaacatagtgaaacctcgtttggacaaaaaatacaaaaattaaccaggtgtggtggcatgtgtctgtagtcccagctacccgaaaggctggggcaggaggactgtttgagcacaggaggttgaggctgcagtgtgccctgttcactccactgtactccaggctgagtgacaaagcaagaccttgtctcaaactatatatatatttagtcacataacttttcactttgtgtaaatattttttgcatttaccaataaaaacaattacatttaaaaattctccttacacttttctaccaaacatactgatgataaaatagtactttatagagtttctgaatctaggatattaaaaatagttgggatcagtcaacactttttaagtaaaatctacttgctagatatgaatagctaacagcttctccaggagtgcctacattttataacttactttgtccaccccttgaggctctgtgttcagggggagggtatatttttgtgtatagaaatagagatgaggtgaaatagagatgaaatagagatgatgtgggatcaactgggagaaagtagaaaagagtcttagctgaagtggttgaggaaggaggatttttcccaaaatggtgcaaaaaacaatgtattaaatatctgtgaaaaagttcatggttgtggtatagggtgagtggtatatgaaaagagaattatgggataaactaatggaaacagatgtcttaaaatttgcttttaactttaaacaagagacatgaaacttaaacttttcccttatcctagaatctgggagaggagaaggatgagaaaaaatgaaattttacattagaagcaatttgattaatgttcaatggaaaatggaaatagctatggtcaaacccactcaaatcaagtgtacattaaataattgagttaactgaattaggcagagtaagggcacattgattttcagtgttgttgaaaattggtccacatatcattgttatgctttttgtttgtaaacctcaatatttattaagtttccacagtgtgctcagccctgaaacgccaaattctcttaaccagaatgaggctggaggatctaacactaagacagatttctattttcttttaaggaattgatttttatggtaattttttttcttcataaagttaagaacctgccagtcctgtttcgaaacacacttatttttagaagtttggttttccgggattatgcatcattatagactcaaatgactcatttagaacttttccctatcaaatattcacattctatcatcatgatcttaacacggcataagcaagttagtgaacagagtgaagtcaatttattggcaatatatgccgaagtacaggaattaagtagaaacaaaagtgaatgagagtctttggcaatacattgatgtgttttttttagaaccaatgataaactactgctgagtttcctttcatttacttttttcctactcttaaaacattgtaacccattttgagatctatccattgttgtgaacctaaagcctattaggtcttattaaataatacccatttaactgacctgtgatttaagtttcttatctgcccccaagcaagcagactgtatgcaacggcattttacctgcttcaccttctgcttgccagttggtttttggtcttcacatgtttctagcagggatggggctaaagcaagggagagaatggtccattgttttagactttcacaaacccaatatactagaatctccacaaaggttatccaatatcagggtgacttttgtgcatccaataaagcataaggttaaaagaaatacaggctaaacaaatgagcataaattactccgttggcttatgctgtgaataaaatattacctttggaaccatctcaattttttttttgtataaaggttgaaggaagacatttgcaaagtcgtttctcctataaaactgcctagggtttggggttgattgttgtatgcaagaggggtcttggtgaaatctgacccactttgaatctaaaattactgaattattagtgaaaagattattttaaaaagagttttgaactctttttcctactgaaattgtattctcctttagataatcaatgcagcatcacccccacagatttttgagggcactaaatcatactcctattttgaaaaagaaaaaagtctattactattaaatatatctgttagttgaatatcaatcactttttctaaagggtagatttggccaatgagtgatttttttttttttttttttttggaaatcacatctgagaacgttgtttagacagcttgacacttagactcatttgtgtaagtagtaatttattcatcatttgcatgtacttaactggacattatcatgatagcagttgtcataacagactattacaggatatgaatttagatattaccttaagatgtgatcataaaaatcagaataatatcttgaaaatatcaattttatggtgagaaaaatgacaaactgaataaactcttgactcaagaagctagacttttcacaacctcatgtattcacagaagtaaaaataacaactaataatgtgtccagagggcccacattgctcagaaatgaatacataagactttcttttcagcctcagaatatgatgaaaagaagatgaaccattatgatgttgcatagattttaatgaagaaaattcgttttctgttcctttcgtttgactttaagtagttgaacatcctgcttttttattttgtttgcaagaaataagaccattttagaaaggctaaaaacattaattacatttaggaactacaataatctgaaagtaaaattggatattaaaggacgtttttgcaatcctttttagccctcttctgtgtattatttttatcactgctcttaaaaatttgtattaatctttggttcatttctgccttagtatttctaagttaataatatattgaatgaaaaatcaaatcagtaaaaatccattttgtttcagtagtgagtgccttccccctagaaccaaaactaaataaatgtgctccatataaagcaaaccaggtacagcatattgcacgggtaactcacaattctagattcctctattaatcattattcagacatgcagaggtagcttaatttgctttaataagtgaaaacagaatctctttgagactgctatctgcaatattatactttgtcctgcattttcttggtcaaaaattgtattttatagccatgatatattttggcttggaatttgcttctttataagcctagttattaatagtcatcatttaaatgaaatgatatccattagccttaagctgcatgattacagagacttggtctatcttacgctgtatttccagtgcctagaacattccctggcatataataggtacccaataatagtttttggaataaatgaataaacaaatttgtgcaaaagcatagggcaaaatgctatcttttagatagcgtgacccttaaaaattattttgcaaataatttgctccatttgccaccagcttatttctggccattgttacttcttgtctctgcatacaaacactctgtgtctcttctcctttccacaatgaccacaagttatactgatctacttgagattttccaggtgactatttcatgtccagaggaacatgcctcttctagtgttcccctctgtgaatgatttcagtcaccttatctactcaggaggtctctcttcccctccatcagcatctttctctgcaccttccaaacccctatgactcaacttctcataatatggattgcattttttttaatgacccattaaattgtgtacctctgctaatgattgtgagtgtgttgagacttccatttttccagtggatgataggtatataatatatatatatatacacacacacacacacacacacacacacacacacacacacatatatgtgggcacagtatctagtggatataaagtaagtgttttcaagtgagtagtaattaaatctaagagttgccgagaaaatgccattcccgttttgtggacatcttcattctacattgtaaaggccacctcattcaagacccaccacaatcttgatcccagaaaacacccatgattcatcttttacagctgccctgtacttcatattttaagttattaaaggctatttgcttttcctcagacacacattaaactttcctacctcttaccctttgttcaagttctgaacacatatctttcttccccacactatgcttcctctttatcagtttcatgtacctactttccaatgtctagttcgaggagacgtttataaggctacatgatagaggttgcccctggggcgatgtgagaaatcagctccaaaaaggtagctacccggcaaaggatcttagtctgtgactctctcatggatgaacttattacctactgctttgcagagtctccctggactagcctgaataggaacttgtgtgactatatgtgaactaaaagaaggagaaatatgcctaaacttctcatccatctttgtaacagccctaaagtatgcatgttactatcccttttctacacaagtggaaaatatttgtaaatgaacttcgttacagtctaatatttgatgacttcttagttcatatcattatttaagtaacttttctttagtggaaaagcccaaaaattagggaggcagggagagagagagagagagagagagggatcatctgtaatctcagccccagcatctataatcccaatccctgcaagggcctctttgggcaaagaagaaaaaggcactgtgtttttgaagagatccccggtcctatgccaagcctaaccaatttggtagtagagcccaggctggatttcagttggtttgtagtcttctagtcttttcatatgtaaatatttttaatgcttttattcagtgttgttaaaatgccctccaaaagatgcactaacttgtgccaccaccaccaagcagaatatattttccttgaataggctacttcctctttttttcccactcactccatttttattttaaaaatccctggtagagaccaaaaactgaaatgttatattcttgcccaaagaatgagagatgcttcagaaattagcaaatgctccaatataaatcaagtgatagatataaataattcagatatgggataaggaaaatgggtagctttctcttatttaggaactctatgtcaggtttctgtgagaaactgtttacgaagcagtctgacaatagctattggtctgaagtattagtaattagtacagaagtgcctaattctcttgactgcttgttctttaataaaaatgtattgagggattatcatgtactatggcttggcatatactggtgaaaaacaataatgtaggattgccttaataaattttctggtcttgggaaggaacagacaatgaataaatgaataggcaaatatatatgtacttgcaaattgtgatcagggttcagaaggaaaatagggtgttgagagtcaaggaaaaaggagacactttacgtagggcaaccaactgggaataggctatctttaaaagtcacatctaactgagatcagaagtatatgaataagagccagctaggcataaagtggatatataaaactccaagcagagggaacagtgtatctgaaggttctaagtcaagagtaagcttgggccaggcacggtggctcatgcttgtaatcccaacactttgggaggccgaagtgggaggatcacttgagcccaggagtttgagaccagcctggaaaacatagagagatcccatctcgcaaaaaaaaaaaaaaaaaagaaaaagaaaaaactaacttaaaaatatatatatatcaatgccagtggtgtgtgcttgtagtcctggctaacttgggaggctgaagcaggaggatcgcttgagcccaggagtttgaggctgcagtgagctatgatcgcactgctgcactccagcctgggcgacagaaagaggccctgtctgaaaaataaaataaaaataaataaagaaataaaaagcttgatgagttctaggaactcaacattttctaacttcttattagaaatgccaaattctcaggcccaccttacacccactgaatcaaaagcactaagtgggactcagcagtctctgtgttaacaagccttccacatgacaatgagatgcacactattgtgtgagaatcactgccttagactgatgttttgagctatttaggggagggagagggcccattcagggacaatggtggttaacacatgtggctcagaccaagaaatgattgcaagcccaaaaacttgttaaatgtaaaacttcaggcgcagtggctcacgcctgtaatcccagcactttgggaggccgaggcgggtggatcatctgatgtcaggagttcaagaccagcctggccaacaaggtgaaacccagtctctagtaaaaatagaaaaattagccaggcatggtggtggtgtgcgcctgtaatcccagctacttgggaggttgaagcaggagaatcgcttgaacccacgaggcggaggttgcagtgagcccagatcgcaccattgcactccagccggggcgacaagagcaaaactctatctcaaaaaaaaagtaaaacttcatctgtctgaagtaacttctgaatttgaagataaacatcctcatggttgatattttaatggtttatggattattacttacttttaaggaagttaataggtttcattaactgccattttgcttcattttgtcacatataattaaaatttttcagacagaaaatattggtattttttctgtttccttagcaacctaaagcatgacctgcttaaatgacttatttgtgctcattaaaagcctttttgtgttaattgtgtatattttgtatttagcctctgtgaaacactcatgaactatctttttatttgttttaattgtgtcattggaaagcttgaagtattttgtggtttttttttttttttttttttttttgcttgttttttgtctataaaggggagataactggcagttgcagttaggattatagaaacattttcccaaggaaattaataaaatttgttcaagtttcttcttttacaaattgtacttatttttgattttttaaatagtggtaaaatacaaattacatgaagtttactatcttggctctatttaaatgtatacttccatggcattacatacatttacgttgttctgctgccatcaccaccatccatctccagaactcttctcatcttgcaaaactgaaactctatgtctattcaacgataatccccaccaggcatggtggctcacacctgtaatctcaacactttgggaggccaaggcaggcggatcacctgaggccaggagttcgagaccagcctggccaacatggtaaaaccccatctctactaaaaatacaaaaattagctgggcgtggtggtgcacacctgtaatcccagctacttgggaggctgaggcagcagaattgcttgaacctgggaggcggaggttgcagtgagctgagatcgagatcacaccactgcactccagcctgggcaacagagcgagactccatctcaaaaggaacaaaaaagaaaaaaccacagtaattccccattgcttcctgcccccagcccctggaaaccaccattctatttcctgtctataaatctgaatactcatttctatatcttctttggagaaatgtctattcaggttacttgctcattttttagtcaggtgatttgttttcttgctattgagttgtaggagttccttgtgtattttgaatactgaccccttaccgggtgtatggtttgcaaaatatcaattgctcctgctatgttcaacttgttcttaaaaataaaaacttttcctttgtggtcaatacttccctgttcctcatttccaaattttatacatgaaggaaatgtgagcacccagaaaagaaagaagatagacactgttaatatggccaagatataattcggcttttattataagaacattggagttacaagcttcatagaaagccatgtcctaaaagatgaagaattatgatcagtgcaaagagaaaatgttaaaaagaaaaagttatccttttatgtttgggtatatattctttttcgatattgtaaagagaaactagagttttttgttcttgtttttgagacagagttttgctcttgttgcccaggctggagtgcaatgttgcaatctcagctcactgcaacctccacctcccgggttcaagcaattctcctgcctcagcctccagagtggctgggattacaggtgtgcaccaccatgcccggctaatttttctgtttttagtagagacagggtttcactgtgttggccaggctcgtctgtaactcctgacctcaggtgatccacccacctcagcctcccaaagtgctaggattacaggcgtgagccaccgcacctggttgagattgttttttataaaaagatgtggattctttatggaaaacacagagcagttaattgctatttttttaatgtcacaaatttggaagcgtgttgagtctgagaagaaaccatagttaaaatataattactgataatcgcttgggaaataaaagccctaaatttcttcatgcctacaaacttaatattgttttcccaagatcttttttttgactttaacctttcttaagtgtttctgattatgctaaatctaggccattagttctgagtctgtttcattatttatattgttattcagtttactcgtcaaaagtgatcatgcccaaatatgaaagtttacaagaattgccctgaaaactgaacggaaggagacaacgaaaagaaactgcataatattttgccttcaggctatcacaataaaaactgttgctggaaaaaaatgcaatcacatcccttttttttttttaaagtacgtttcaatggcataatttattgtcgagaatgtctctaccagaagcataagtgatactaaaggcagagggttgtattcgctcagtctgcaaagtatcccctttgtcttagctccacacagtccctcagaatttggcagaaatgagggactcaactttcgagaaagggtgacaatcccagttttgttggagagctatgaaatagccccatagtgttagtaatgaaaattcacttaagaagtctcctgcaggcccggcacggtggctcaggcctgtaatcccagcactttgggaggcctacgtgggtggatcacctgaggtcaagagttcaagaccagcctggccaacatggtgaaaccccatctcttctaaaaatacaaaattagccaggcgtggtggcgggcacctgtaatcccagctactcaggaggctgaggcaggagaatcacttgaacccaggaggtagaagttgcagtgagccgagatcgtgccattgtactccagcctgggcagcaagagtgaaactccaccttggaaaaaaaaaaaaaaaaaggaaagaaaggaaggaaaggaaggaaggaaggaaggaaagaaaaaagagaaagaagtctcttgaaaaaaagaaaggaagaaagaaagaaagaaagaagtctcctgtataaaaaaaggaaagaaagaaaagaaggaaggaaggaagaaaagaaaagaaaagtctcctgaaaaaaaaaaaaaaacaaaatataagtgcttgacaactgaagttcaagggtaaaggctattgggaaagcagatgaagttaatctaagtaatggatgctgttggtgccccagtcagattcgttcactgggttggtgcacccattcctcagtgactctgagtattagctgctaaagcctcatggtttcacccctttccagagaacctccctcagccaaaaggaagccaccttgactggcatgtcccaccacaccttctctcttaaaaccaccaggggtacaaagggaaaacccctttgcctcatcatggcacctgctgttgtacaatttgtgatctgggaattcccatggggccagattgatgctggtctccagcccataccacatcccaacttaactttcttgccctgtcttcctgcttctctcactccctttttcttaagagcactcagactctgcttctcttaaacctggctgaaggcagtaggtatctgaaagaaaagctgtacctacattctgggcatcagagcagtcagggaaccaaccagaatgaaaagtcaaaaattacagataatgatggaagtctctgagcctgatacatttcatgaagggcttgcttacagctcaacttgtgtttctttttaattgtttcaacagcatttgagtagctcattccgcccaggtatttgagagattccagtaggcctctgatcctctggaaaaagcaagatacagtccttgactctcttggccccatgaggatgatatatctgctgagaaatgcaggagctgcaaaacatagctgggctgtacctgctgccaattcccgggtaattgcattctgtgagggcttccctgaaccacgaggaagagccccggaataagtactaaacaccagtatttataggacatgatttctaattgctcatccttgccttctcatgactagctcagcatgaagaatgctgggacttttctttcctagcacctcctctttttaggctgttttccaagagtcttggttaacaaacatttgtttgacaaggattcatggtagacagcaatgccattagtccctacttaagtaatatttgtaacataaatttctctgcacgtgtatgtagcccaagaataacacttcatttttggaacctagtaattttgaattcctagtaagtgagataggacgtctatgagttagcaggttaagattttaggaggaatatttaatatccctaagaagggaagtttttcaaacactgagtagcactatatatatttatatatatatagccagatttctatctatctatctatctatatatatatatatatatatatatatatatatatcacaccatttataaataaactcataagtggcaaatccagtagagctaatctgagcatcccagagtctcccctctctgtcgcttgtttgtgcagctactcctgctgtggccttttatggattatcctggacttctacaactgacccctctactttctctccatctacaagcttcattttgctttgctttcctcctaatccagtttagattccacagtatattttttcaattacatcctggctaatatcgaaactcccttatccctaaatgtgtgagccacagtcatctgacgaaaccccaaacctggatcaactgttttccccatgcttacatgcaacactgttggagaaaatgagaaagtcaggcagattggttctgctaaaaaatgttgaacctcatcctcaagtgggccctcaacactgtttgccaacctcattacatctcttaggtcaactccctctcacagtctctattacgattaattcaaatgttcccacttacccttaattcatgttttcattcagtgactattcattgcacaccaggcactgcacgctatgccaggcactgcagactatgccaggtctgttgattcctacttcacagaggaaataaaacccctccaagcagaattccctcaatttactctttctagtctttccaactgaccttctgtgctttgcagtaggaatgttctcttaactgtcaagtcaaaattcctccctcaaaaataagattcccttgttaatagacaattcctttattttcttagaaaagtagtagatgactataattttaaatgtgtatttgaacaaatccttagctacataaagataagcaaagatatgacaggcaatttaattttatatgaagaaaaacttattatatcagacttacctatcattctaaatcagtacttttgtatctataatcagacaacatttaatgaactgaaaattctgcctgtgagaaactagtcataataaaattagacttggtttgctctttcatggagaacatattccagatgtttaagtgattcaaagaaaacccacaatataatggctttcttcaatgttttctcacttactgcttccaaactagaaaaaaaacctaatgcaatcctgatatcacttaaatagcacctcgtattgctcagcgttaactgtgctttttgacattttaggtgtagtgtttaataatttaaacacaaatttatgtgtgtcatattaaaagctctaatctgtgaaatatagccaaaccaatgtcacatctatttaaatagcaaagtacctgtgttcaccctttacagggtgaaggtcttgtgactctgtgtttaggcggccatacttcttgttatgtatgctgctgggcactgagagcccacagtggtgagccatccttgggtggtaaaagctgctaccaaaacctaaatcaaatgccaaagtgaagactgacatgagcattctcctgcctccttttcctttttatctttcctaccatctgttatctcctttcttccaccttcatgcgttgagtgccctcatgatgatttctagctgactgaagtcctttagtctgctcaaccccatctagagacttccccaaagtgaacctttgcccccagttatctgtttatcaactgacctcacaccagtcaaagcttccattgtcaaatattttaacagaaatttaggaattcagattaaactgaatatttggcattttttcttttttttttttttttttttttggagacagagtcttgctgggtcacccaggctggagtgagtgcagtggtgccatcttggctcactgcaacctccacctcccaggttcaagcgcttctcatgcctcagccccctgagtagctggtactacaggcatgtgccaccacgcccgaataatttttgtatctttagtagagacagggtttcaccatgttggccagtctggtctcgaactgctgacctcaagtgatccacccatccacccacctcagcctcccaaagtgctgggattacagtcttgagccaccccacctggtctgggttgttttcttcatctttagcagttgtcttgttcacaactacttcaacaatatttattttctttttctttttgaagcaactctccagagtatttggcctggtttttatagaaataataacttttttcttttctttttaaactaatatttttatgatttaggaaatctttctttattaaattacataatcacaacagttactggcaaagataggtttgagaacatacacacaactgacggttgtaacaagtcaactgatgggagcagaaggtccacacatactgacaggcacctcgaacattttattgaggctgtgagaggttcccatcactgctgtttcacaaagagaatgaagactttggctaatttggtgagtcttaagtggagattagttcagagaacttccactatcattgcttgaaagaagcaaaaaaaaaaaaaaaaaaaaaaaaaatcccaagatcttatggtaaagtttaaagaagaaaagtaaattttaaaaagaaaaaaaaagaggaaaagggagagcattgcaattaattatgagtaccaaaacttatttttgaatccccttcatcctccaaaacattgaagcaggattaatatgtgtgctcaggaatttgggagagaaaatgaaaatcaaaatattctaataagagacatttgaaaatgtacattgtgtcacctaaagggaactgaaatctagctatggcttaacgaggtaggataatcaacttaatggcttgagagtcttgcttgtaaagagagatgattagcacaaaggactcacctgtatcactgaaagatgctgcctgctggcttgccctctctgcagaggttcctgtttacagtttcccctcacatgatatttatttgtggctactagaaatgcacgttattatccagaagagaatgatttcattttgtaaccgttgtccttgtccaagtttcccccattgacatttaagaaatctgttttctaacctttctattatgcaaaacaaaattaatatggatcatttccttttagagataagtattcatatatatggatttaaaccacctttctccatgggcccttattctgatacttttaatccatgtatttattcataaggaaatggaacaatatttactatccacccctataaaactttctgaatttcacactgattccagtgacattccactaacacgaagttgaatacagatgaatacatcacatatgattttttttttgcatgtgtatggtcagaaggggctctcttttgtttgtttttattaatatataattcacatactttaaaattcactctttcaaagtgtacaattcagtggtgtttagtatattcacaagattgtgccaccatcaccattgtttaataccagaacattttcgttatcgtccaaaagaaaccccctgattgcttaacgtaatgtttttaatgaccactttttaaaactttaagttcaacagagtgattatcacaatgttttgtattatctaagaactacacaacagtgttatgctctatacagcaccacggtttactgatgaagtattcaggttgatttgagaggataatgtcgttcttattttgaatgttcatactggctccttttatttggagtgggaggaaatgcaaggcttataaatgaggtcagtgtaaccaatggttttatcaacatagtgaaccagacagagaaataacacctgcccagatcaagcaagtcaaaacaacacgtatagtcaagtggtgctgtccttgtacacagacattacattacacaaactgttctcctaagtgagggaatttgtcccttagaaattgcttattggaacatttggacatcatgcatcatgttaaagatccataaatgccatctcgatagggtagatatgaggcgtggtaatatcctccccatatctgcatagggttcttctgctcaacggattgctatgatgtattgcatcagagactcctgctctagtgcttcaaagacagctgagaagccccacgggagccttctgaagtcattgctacaagggctaaaataccaggagatcaggaagtcattctgaggacttgacaaaataccctactccctaaatgaaactgttatgatgtggttggtgcaaagtatgcatgcaatattttatgactgaatatatctttctattgtaaaaaataaggatccatttctggttgtgacatgagtagaatttagaatccagcagcaatatatttttcttgttactttgccaatccagaatttcttaggggaagcatataacataatagttaagaatatatattctagaggcaggcaaacctgcatataggtatcccaggttcctcaatttttacccatgagagcttggcaaggtttgtttgttttgaaaacaaacctctgcaagtttgttttctcatgtataaaattagaattctccaactactggcctcataggattgttgggtagaaataaaatcagtttatgtatgaatagagctcatcatggcattaggcacctaggaagtgctcaacaaatagtagttatcattattcccccattaacaaatatccattgttataatactaccacaagagactgtcttagtctgttccagctgctataatagaaatgccataaattggatagcttgtgaaacaacaaaaacttatttctcactgttctggaggttgagaagtccaagatcaaaataccagcagatttggtgtctggggaaggcccattcctcatacaaagcaccttctcactgcaccctcacatgctgaaaggagctagctagctctctgaggtctcttttataagggcgctaatcccaaaaatcacctccctaaaggccccatctcctaataccattgccttaggtgttttgatttcgtttcctttttattttttaggatttcaacataggaatttgaggggggacacaaacattcaaaccgtagcatagagcaaacattactggcactgcaccctaaagagaataagcccaggtatcagttcttcttgttttaaatattctcatcttccaatttgcttttgactattgcacacaggcacttcgaggagaaattgcgcctctgaaagagaacgtgagccacgtcaatgaccttgctcgccagcttaccactttgggcattcagctctcaccgtataacctcagcactctggaagacctgaacaccagatggaagcttctgcaggtaagcacattgtaaacattgttgtcctttgttacagtaaaataatatacagataaaatttgtaaagaacaatgaaagtacttttttcatgtaatgttcatggtaatatttgtgaggataggatattttatattagtttataattcccatctaaacattttcaaattattaatattaattttggaagcaactaagacttagtatatgtcttagtctgtttagtgttgctataaaagaatacttggggctgggtaattcataaagaacaggtgtttatttggctcagttctgcaggctgtacaagaagcatctgcttctggcgagggcgtcaggctgcttccactcatggcagaaggcaaaggggagctggtgtacaaagatcacacggcaagagaggaggagaaaaagagggaggggaggtgccagttctcatgaaaactgctagagcaaaacctcgctcactaccgtgagaatggcaccaaaccattcatgagggattcactcctacaacccagacaccttccactaggcctcaccaccaacacgggggatcagatttcaacacgcgagttagagggaacatccaaactctgtgtagcagtattcttacgataaacagaaaataatgctgaatcatgatggaagatgtgaattgccaccatgcagttcctttgtactcttactgcttggattctcaaaaacatctttccctttagaatcctaatttaaacaagagtcaatagtaagatgtgtccaaaagtcatttaaagaaagagcatcctatcacaaacttacatgtggaagtttttcgtaggtttgcgtaataaatacaggcaatgtaagtgtgctgctcaaggtcacacttactagccatgggacctggagcaaattacttaacctttctgagcctcagtctttcatcaaaaaaaaaaaaatgcgataataaaattctctgcaatatcagtttattattaggatgaataagtcaaaataaatggaaagtgctcgggagcgaacatgccaaatgataaacactctacaaattctagctcttgatgttgttattattattattattacagtacacaggttttggaatccaacatattagctgagtgaccttgaggccacttaatctctgtggttgtccatttactcatctctaacatggttactgtaacatcgaatgagttaattcatgcagagtaatggttgtagtggtggaagaggtgcgtctaccttctcagtgtgaaggacaccatgttataccccaaaaccctaaaattagtttaaccgtagaattagagaatcattttctctcctttccaattttctcctttccaacaggatgcagaaggtatgcctctgaggaaactgggtttaaaactatttggttttaactttttaataagaaaaatataataaaccaaatcactttcctattgtcagtccatttaggggtgtgattgagaggcctgttaaagaattgctagatctttaataaagataagttgcaaatcccagacctcttgagatctcacataatttaattcttgttgtgatggatagtcctgaaagatttgtattctagattgttataagtggcatcgactaaagcaaggcgatatagctaagtgattatatgcctttctctgtttgctccatagtagttgagtactattaaaattttatctgttccatccttagtatgtttttcatcttaagtataaataaggaaagtaataaatgtccaaagaaaaccaatggccacattagtcccatataagtgttctagaagtatattttataatttcttttagagagcagaatgccacgtttgctttcagaacgtggtaaaagatttgtgacagtggcaggtagatttccaaatgaggtcaaaggattatgactagtaagaaaagtttttttttttttaatcaatgctaagtgatccattctagttgcactatttatttgcatttaaggtatcaaaaacagtaaatagcttactatgtagccattctttacaatgagtaaaaacttggttataagtacaggaaaacacatgtaaggagatagtatgatatagcgaaaagagcattggattgactattaggaggtctaacttcaaacttaagctcagccattatttgaccgtgttattgtgagaaagccatttaacctctctcagctttaattctcctcatttttaaaatgcagaaatctattttgtctaaggtcacatacagttcaatcttatgattctgtctctagatatctgggggagatacacatttgacagaatttagtttaaaaccaatgaagttcctttctttattcataatacaaatgtggtttgttgaaattatatttctccttgtataactctaacttttaatctcttcttccctaaacccacatatacacagccttctcctattaaacagttcagtttgtggtgtctgctctatattgtagcaaatttcatgtttctatttttgaacatgaccttaaagatatgcttaaaaagtgtttttagcagaaagctgataaatccaaggttttggtttgcatataaccgagtcaagttagttccattcttttctttgatagtaattctgctacattataaatgtgaggccttgttcagaaagagaagaaagcaagaaatgaggttcacatcaagcaatttttttcccattactggaaaagcaattcatacatcctgttgagaatattttatatttagaacaatgtatgtgaggctaacgcattatccaagttctatggcgggaagcttgagcccaccaccattatgacatcatatttttttaaatagtaaatgtcaaaaaagacatatttctatgaaaataaagaatttagtcacaatgctatgtcaatctttaaatcgtgataaaaaccaagtacaagttcatctttgcctctgtccactaagacaaagaacaatcaaaaagtaaagaactctctgggcatggtggctcacgcctgtaatcccagcactttgggaggccgaggcaggcggatcacttgaggtcaggagtttgacaccagcctgaccagcatggtgaaacctcatctctactaaaaatacaaaacttacctgggtgtggtggtgcgtgcctgtaatcctagctactctggaggctgaggcaggagaattgcttgaaaccaggaggcagaggttgcagtgagctgagatcgtgccactgcactccagcctgggcgacagagccagactcggtctcaaaaataaaataaaataaaataaaaatagagaactggagtagtagaaaggcagatgtaaacctgagaaaagaagaagagtcttaaatttgggcaaaatagtataatagaaagattagagttacatactatcaggccgtgtctacttgatatcagaatatcctgggttctttgcattatccattcatttaattttcaaggaaagccatgctagttttttagctgtctgtaatatcagtcaaaatggtgaaaccagttaagggatgtgagcaccaacaatacagtcaaacccagtcacaatttacctatgtatagaatcataatgtatagagaattccaaactgactttgaatcttctaatagaaatgtaagagacattggtttgcctgtttgaaattttctgtgggaatgaagtcctattttcttcctcaaagtagacacattggtatgcatgttactatttgaccatttgactttttgtggtgtaggaaaccatcactccttgcagttagaaaaagtcctcatgtgcattctctcatctaagaatcacaaccttgtgattttgtattatgattatgattacctattatcattattcccttttacgtgtaaggaaaccgaggcttagaaacatgaagtaccacagtcacagtcacataacttgtatcagtcaagatctgagtcaggtttttcgaactgctattcccatgctctttttgtctcctcttctcaaaatcctattacgtttggacttaacaaagcaataatggctgggtgtggtggctcacgcctgtaatcccagtactttgggagggtgaggcgggtggatcacttgagatcaggagttcaagaccggcctggccaacacatagtgaaaccccatcactactaaaaatacaaaaattagctgggtgtggtggcgcacgcttgtagatcagctacttgggaagctgaggcaggagaatcgcttgaacccgggaggcggatgttgcagtaagctgagatcatgccactgcactccagcctgggcaacagagcaagacaccatttccaaaaaaaaaaaaaaaaagcaatactttaaaactattttggacaatacaggtgtaaaatacttcacttttttacatgtatcttcttttttgaaatgattcttaggtatattaacttttaaatcttccttttataaaccaatggattaatgaacccagttcagtgtaccccttagaaatcacacttgtttcaaatataaaattttaaagcattatattcctcattgcctttagaactcagcaattgtactaaaatcagccaaaagtgatttcagtgaatcagctcttaaagccaaactaatgctaatatttgaccaagtagaaacgaatatctaaaccaggtgagaaaaaagttaaaatgatgataaacctttctaattttgaaatagtacacacactgagtaatgcagtcaatctctttattcaccaagcgcaagtagtatataaaggaatattataccatttttctttactcatgagtaaacccacaaatagcacaaaagctgcaaaaacactttaacataaggagtatttgttttattgactgtaggaactcatggaatgcaaacacctttaaaatctgaataatatgaaggcatttccagctattagattctttacatatgtcaaagaacagtatcataaattatgtatgttttttaaaggtttcctaagcttcttccaaagtcatgtagacatcattacactccatctgtatacctctgtggtaacttgctgtcgcagggatctagagcctcatcttttgcaaacttcattccttctttcatccctttgttctttcattcagtcagcactgattgagcatctactgtgtacctagaagacattgtaatgatcctgtttggtccaaggacatactaaacaaaactccctttactgcttatgctatattaagtaaagctttaaagatgggttctcttttattacttccatgatggcccacccctctcatcctttctcagtgttaaaaaccagaaatatacatacttacatactatcataacactgatactacaaaagcagtacccattattatctctggtttacaaattattcaataatttcttactggaaacttggtctatatagtcatagtagtaagctttgtgagaggatgtgatgggatcatagttagctaaacaataggagtatttgtgtggcttcattttaaaaaaactaaccagtttttttccaacaagcaattcttatatcagaaccatttatattctttactttggtgagataggattttctaagcaggtcttttatctgtatctatgtatgtttgttcttaccatcattgagcacaggatttgatcctttaaatgtgttgacagattttgaacattttcctcatatctttcttttttgttttttaatgatcctgtactaatcattttgcattatggggtcacttctggacagagagcctagccatctgctcttacaaataatgtcggcctatcactaactggggataaggagaagacatctaccgatgtctttctagcatgtccttcttgactttttctttctttaagaagactaaaatgattcagcttgtggttctaccacagaactcaggagaaaatgataaatatgaggccattctccaaataaatatgttttcctacattagtggttctcaaattttaacaagcatcaaattcacctggaaggcttattaaaacacagataactgggctccacataccaagtttcaaatgattcagtgggtctggtgtggagcttgagaatctgcatctctaacaaactttcaagtgaggctaatgctgctgaatcatggaccacactttgataacccctgttctatgttaagtacttgtcaggtacagacaaatttaaaagttaaaaaaatatatatatgacttctgtaagacactgtgaagggtttagactctggggaaattaagtataatgccatcccaaaaactctgtgttggaggagtgttcaagtgctgcaggatcatggagaaccaagcacttaacttttctatgaggcagaaagaggaagataaagggaaacgtggaggatgaagggaaactgttaatagatccccagaaacacaatttgctgctatatggatttatatttactgtatttcaaatcacatggtctagaactgtgctgtccaatatgatagctacatatggccattgagcccttcaatgtagccagtcgaaagtgagatgtgtagtaagcgtaatatatacacatgtaatatgtatatgttatatatatgatatagatgtaatatgtatgttatatatatgatatatatgtaatatgtatatgttatatatatatatatatatcaggatgcaaagacttagtaccaaaaaaagaatgtaaaatatctcattatttttatattgattacatgttgaaatgatagtatttttatgtatttgcttgggtaaaatgtcataatgaatttcactcatttattatgattattcaaacttggttatttttcttgaaaatgaatgaagtgagcctgttgcttcggctacaacaatgggcagtgtttctgcaaaatttttacatgtgcctactagaacatttaaaattgtacatgtagcactcattatatttctgttggatagcattggcctaaaagttttcaaaatctagcatggataagaatcacctgcaaagcttgttaaaccaatccgcccccagaaatttagtatcgggtgaggcctgcaattctgcatttctatcatgctcccaggagatgctgtctatttgtaaccacatatagaaattcattcccaaactacagatgatagagttttacagagaggtgcaaaaatatatttttgcatcaagcattgtctgtagcttgaatacaaaattatgttgcccatataccactggtttttgtaagtaaagcagttgtgttacaaagcatacaagtttttatcagctaatagccttttctcaattagcagatactaagtagtacttttattatgtggcaattctccagtttttggaatgttattgagaaatacacagggttaaaacaaattagaaagcacctctcccaaaatactgcagtaagatgtaggaaaaactgctctaacatattctaaactataggttgctcttatgtaaatatttcaactataatatctagtctgatgtgcccactggccagagttttgtaaaagctaaaagtaaaggaaataaaaaaaagaaagaagtatgtgtttgtttttgaaaaggttaggtcacagaaggatttgttgatattaggaatagaatgacccgtgaaaaaaggacaattaagttccaggaaaacatcttttcagtaaggagagaataatcatttatgcttaacctcaactctgttaggaaaaaaaggatgtaaacaaaaccctttaaagaattgaagaaggagagtataaatttaaatgcccaggttagtgaccacccttagagcatactgaggtcaaagcgtactgtcaagcttaagaacatttggttttcaatgtttgtacaactaattgtactttagtcaagaggactgttatcgaaattgctcaggtagccttgaaactaatatggcccaaatattccagagtctgtctttctcaccctaggagaagaatggtctggttttcaagggaattctctattttttttttttgaaggcatcaggatgtgtgaaactacagggggataaatgaacgatgtacagaatgtgatgaaaaaattatatgaagtataaaatgggaatgaagccatcaggagccaaagaaatatttatgaatttaagagaatgaaaagcatattattattttcagatattttataaagtgaacccaaatcattataaagtattaattaggctacttgattgcttgatctttatatactaatttctaatttgttttaatcgggaactatttttgctagttctaaggctagctattatggtaatccatgtaagtgtgtttattattgtttttaaaaatggaatgtgttcctagtaaatgtgtttaaatagcaaaatgtatttatgcatgcatgtatttattttagtttcctgagacctctagttccttactagaaacatgtatataattccaggcatttaaaattgccatgatggtcatgttttcttgtccttttcccttattctgcaactgacatttgcccttgtctccaatttctcactgctttattctttgttcttgtaagtgttcttgtctctctgggctgacctctctccttccctggagtttgaccccgccccaccctttcttctgcatttgtttgcactggttgttttcttcattgcctttcccactgccccgctgcgctgcatgtgaaacactccgccagtagctgctcacagttcccatgctacatcatacccagcattcaaagagctgctgttctcacatggccgccagtaagattcccgactcctccttcacagcacattcctctagaaagtagaaagaatcccctttcaggccacatgagaagctgcgtgttaaagccaactccataaaggggaatggaaactagcgtatgaaattcagaaatgctacttttaaaggtaaataccacaaagtgaatttcaaattcatacagtttatcataatacttctttatttttataaatgctataatgtccttaatataatgatcactgtgatataagttgtcctctcccttaatatattaattaatttactaaaggagacgggagggtggaaatataataaattagaagatgattcttatatcagaagtacagcctttatacatagttttactttattcagacaatcaatgtagtcatatggtataaatttgaaaataattttagtgagcattacgcttactgagattaatagtgagaacttacctagcacttactgtatgccattcacaattataagcacttttgcatgtgctaatgcttttaagcctcacgtaacccagtgagggaggtacaattttaacctcattttacaggttagaaaaatgaggagcccaagggttaagtgacttgcctgtggtcatatatcaggtaagtgagagagccaggatttgaacccagacagtctgcctggggaatctgtcagaactcctaactatgcagtaccactcctctgataaaaagttgaattgacatgacaacatttcctattcatttatgattcgaccctttaaacaaaaagaacagcatcattctcacatttattaatttgtcaggaatcacctggatcatgagttgaggaaatttaaagtaggagggttgtatgaatttcagaccacgatctcaagaattgcctgtttaactcagagcctgaatcattcacagactaaaaactagaatcactcttctgtaggaccaagagggttgaatcatcaaagtcttgctgaagtgaacggaaatcctcctttgttcaatcattcattcaataattatttttttctggtgtctactctttaccaaactctgtttgagatgatagggattcagtcatagacagaccttctctgccctcatggaggttatggtttcttgggatgacagacagtaattttttaaatctcataaaataattacaaatgtgtcaggaaagaaaatacaggacactaccagaatatatagtaaggacctaaatgtgtgtgtgtgtgtgtgtgtgtgtgtgtgtgtgtgtgtgtgtgtgtgtgtgtgtgcgcgcgcgctgcagtaagggtgagaggcaggaaagggcaatcaggacaccctcccaataaaagtgacctttgaccgagatctgaaggatgaagacaagctgagtgactcttctattcatctatatcttttgttttaaatggcctgaagcctgggactaactaaacagggttgtaaaattccagtatgtaaattgaataactagggatcatttgaagtaatggactgcagagttaatgtataattaagtcacatctagggaagatttcccatcattatcacagagagcatcctgtttgctttcttcacagcacttacgaaaatctatagctatgtgtttggtggcttgtttaatgaaagtctgtttcccctatctgaatgtgagctccataaggacagaggccctgaataccacatctactgacatttggcagtgtctttcatatagtaagcattctataaatgtcttgaatagatgaatgcataaaactaagttaaaatgttactgaaaactataaaaataagcagaaagttataccagaggagaaaaattaggggaaaaaaactataatttctgaagacgtagtacttacatctaaatttgtggcttcataaggttaaccaacacttaaatagttttgccaaaactccaagaaaaaaatgaccgggtgtcgtggctcacgcctgtgatcccagcactttgggaggtcgaggtgggtggatcacctgaggttaggagttcgagaccagcctggccaacatggtgaaaccctatctctactaaaaatacaaaaaaattagccgggcatggtggcagacacctgtaatcccagttactcggaaggctgaggcaggagaaccacttgaacataggaggcggaggttgcagtgagccgagatcatgccactgcactccagcctgggcaacagagcaagactctgtctcaaaaaaaaaaaaaagaaagaaagaaaaaaaagaactaccatttgacccagcacttccattacttggtatgtacccaaagaaatataaatttttctaccaaaaagacgtgcgctcatatgttcattgcagcactattcacaatagcaaagacataaagtcaacctaggtgcccatcaatggtggattggataaagaaaacgtggcatatatgcaccatggaatactacacagctatgaaaaagaaggaaatcatgtcctctgtagcaacatggttggaactggaggtcattatcctaagcgaattaaagcagaaacagaaaaccaaataatgcatgtgctcacttataagcaggagctaacctttgggtacacatggatgtaaagttgggaacaacaggcactagtgacaagggcaggagggtgtgggacaagggctgaaaaaactacctatcgagtactatactcactacctgggtgacaggttcaactgtactccaaacctcagtgtcacacaatatacccatgtaataaacctgcacatgtaccccttgagtctaaaataaaaattgaaatctaaaaatataaaatatcaaatcataaaaataaataagaaaacaattgaatctactgatatgtttcattgcttttaaaatatccactttgaattactgaatattttaatatttttagttttacacttcagcacagaaagtccagaaatccaacccttgagtttacaaagacaccacatgatagttcatagttcacacagctagttagttgtggaactagaacccaaaatttgctctctatgtctctcacataccttttccctttattctaataaaggcatttgtcagtctaaatgtacaatattcgaagacattttttaaaggaactacttatccaaatcccacctgtcttacaaggtccatgtgaagcaatgagataaggtctgtgaaactgcttccgaaactatcaaatgttataaaaatgttaagttttattattagaactgcagttcatctctatgaaacctttctaaactttctcacttttctgaacttgactacgcagcgtcttttctaatctatttgttctccctttataagaagaatttaatcctttccgccctgctgggttgtaagaaaaaggactctcttcttttctataatctattgatatttgattatattacacatctaatgggttcccaataaatacatagtgaatagaattgaaccaaatttctttctagacatgtgaaaaaaaatcctgatctttaaatagaaagggtactttcaaagattatatatagaacctcttggtattttgtatttgcaatgaaaatattttaatttgggccaggtgcggtggctcacacctgtggtcccagcactctgggaggccgaggtgagcagatcatgaggtcaggcgttcgagaccagcctgaccaacatggtaaaaccccgtctcaatcaaaaatacaaaaattagccaggcatggtgacgcatgcctgtaatcccaactactcaggaggctgaggcaggagaatcacttgaacccgggaggtggaggttgcagtgagctgagatcatgccactgcactccagcctgggtagagagggagactccatctaaaaaagaaagaaagagagagagagaaagaaaagaaaagaaagaaaatattttaatttgtcttatgttcaacagttgcatcatatctgcatccttttgttaaaattgaacaggcttctagtttcatataataatttctggccaggcgcagtggctcacgcctgtaatcccagcactttgggaggccgaggcgggtggatcacctgaggtccggagttcgagaccagcctgaccaacatggagaaaccccatctctactaaaaatacaaaattagctgggcgtggtggcacatgcctgtaatctcagctactcgggaggctgaggcaggagaatggcttgaacccaggaggcggaggttgctgtgagccaagatcacgccattgcactccagccggggcaacaagagcgaaactccgtctcaaaataataataatcataatcatcatcatcataataataatttctaccaacagctggcaggaaaaaaatatgagagcatagtcatgaacttcagattccactccccttacttttggcattccattcctctgaattatagcttatatttctttattatctcagtttgatttagtctttctaaatattcacctctgtttccatccataaatatcgactgaactaccttttaatatactatctttttgtaacagagaaaatcaagtgtaggtggattattgtaagtgacactgaggaaatataaaaagaccttgacttgtccaggcgcggtggctcacgcctgtaatcccaccactttgggaggccgaggcgggtgaattacgagatcaggagatcaagaccatcctgaccaaatggtgaaatcctgtctctactgaaatacaaaacattagccgggcatggtggcaggcgcctgtagtcccagctacttgggaggctgaggctggagaatggcatgaacctgggaggcggagcttgcagtgagctgagatcatgccactgcactccagactggtgacagagtgagactccctctcaaaaaaaaaaaaaaaaaaaaaaaaaaaagaccttaacttgcttcaaacaagtcaggacccccaattccaattcttaggtctggcattcccatcagacacttaaactgtaggggcagtaaagttgcccatgtggctacagcttttgtggctgtgctgtacttgggaattttaatgttaccctctttgaattaggtccttcattgatcatgcatctcaaagtatctcagtgccacataaaaattttctttcagagtcatattttcccattatgaatgctacctactgcttatctgttgagtgtacacttttaaaccttctgtgggtggtggcccctttgccactgggtgagttagatgctgatcctggtcattatcgctgcctttccagccttttctgctcttacaccaagcacaagaattctctgctgatagtcaggatctagggctgggaaaatgggatgagttgtcctgttagacaggcccaaaaggagtattgtttaatccccagggtgtggggaagaaagatactcttgttttcttttccccaaatgtgtccatatacacccttctcctttgctggcagccaccaggcttgttgaggatctaccctcctctgcatatcatgtgcatcaagggaagccccaacccaagggaatacataatgatagtcctgagctatttcatggtgctctcgcagtcttgattgccctcttcggaattggacatggtcatattacgcaattttaggtaataaaatacaaagggcattcagctaagggaccttctgagaaaggtttttctcgtctagagaactaaacaggcatccttctccgggcactatgcgtagttctttattctacctggaacattctttctccagaaatctttgtgactaactctgtcatttccttcaagtcttattcaaatctcaacttaaaaaaaaaaaaaaccttcttaaaatttgaccacactaattagacagcaactgccccatctccctcttcccagccatctgaatccatttcccacttacctttttatgatagctcttctaggaaggcactccctcctccctgtgaatcatgtctccaggcaattgttccttgtgtagaggaacacaccaaatctgggctgctcctgtacaacaaactgaaggaggtagaattgattctgcaagaagttcaaagctaaataagaaggagtcttgtagcttctgtcttggtcttctggaatgctcactctggggaaagtgatctgccctgtactaagtctactctaaggccactgtgctgtctacatgaagaagccacaaatctaagctagccacatggggaagctgcatggaaagacaaatacgtggctagcccccagctgttggccgaagatccgcagccatcccaagtgaggagccagatgtacaagtgaaaaaactgtaacagccattccaatggagccttcagatcaattcagctttggctactatctgactgcaaacacatgaaagaacccaagcaagaaacacccacctgagcacagtcaactcacagaaccatgagcaatactgataaatggttatttttagccagtaagttctagggtgatatatagcaaaaggaacatctgtcctgttttttctggtttttcctatcatacactcattctgcaggattaacatgtgtaatatactttttttttttttttgagatggagtctcaatctgtcgcccaggctggagtgcagtggcatgatctcagctcactgcaacctccgcctgctgggttcaagtaattctcctgcctcagcctcccgagtagctgggactacaggcatccaccaccacgcccagctagtttttttttatttttagtagagacggggtttcaccatgctggccaggctggtctcgaactcctgacctcgtgatctgcccgccttggcctcccaagtgctgggattacaggcatgagccaccactcccggcctaatatacttttttaaattgtctttcactatgagaaggtgagctccatgaggccagggatattgtctgttttgttagctaatgtatccaaattacctaagaatagatcttagcgtggtaaatatttgttgaatgaacgagtgaatagatcagaatttcagtagctacgttgtgagtatgtggacagttcaccaagaatggcagaatggaaggatgggaggaacctggaataatgtcattgtgcttctggattacccagtcctggagcagctttgcctctgtgggccttgactagtcaagacattttgtgttgggtttttatgttaattccatttgcatcactataaaggaatacctgaggctgggtaatttataaggaaaagagatttcattggctcatggttctgcaggctgtacaggaagtgtggtgacagcctctgcttctggtgagggcttcagcaagcttacaatcatggtggaaggtgaaaggagaaccagcgtgtcacatggtgagagatggagtgagggggtgggaggtgccacactcttttaaacagtcagatcccacatgaactcactctgagtgagaactcacttattactgcaagaatggcactgagccattcgtgagggatccagccccatgatccagtctcccccaccgggccccacatccaacactggggattacatttcagcatgagatttgaagggaacaaacatccaacccatatcagttttctacaacctgcagcagaaagcatctcatctggcacatggtcttgcaaataattctgacttagatgcatgggactcagatatgactgaaccagaagataaatctaagtagcagacaccacagtattctcaaaaccactctttctctttctcttgttgaccgaggcttttctactgagcaaagcacctggtttataatatgttctttcattacgccttctcctaagagacctccttagtgtccctgcaatggatgtctggggagccaccaatctcttagagatgactagacatgtagccccagaaatggttacaccttgagcttttctctcagtgcagatgagatacattgcccatcccaccaatttgccacatttatctaaatttctgtgttaagctgggacctctaccactcaagctgggatgcccctcaccaccaccacactgcaaaaactaaacatttttcattagcctcctacttgcaattaagtacataaaacctgcaaaacaagtaataaaattaaggcactatttggttaatgccttttctcagaaatcacttttgcatgaagttcagttcagtattttatcagtgactacattagtctcgagaccctctacccaataggagggacaaagatgtacatgacacaggctcccttcaaagatgattaatacatgaactacatacagtattacaagggctccactagagatgtgagccccccagaaatgatattaatgtgcagaagagttagcaataaattttgcacaaggggtgacatttgagcttagactcgagcaatgagtagggttccaagaggtaaagaaaaaaatggaatggttttctaggaagaaaaccaggtctgggaagatctgatataacctgaggtagtttataagtctggaatgactgagttatcgggtatatggtggggaaggcagcagaggtgaaataagtaatatctaagcaaatgaaaaacatgtaattaggggagatgaaatataattaaattatttaccttaattcctcttttgactctttacatttgtcattcataaggaaacaatttcactaagattgttttgacctttttaccttatttggccaagtaaacaagggacagaaagtttttaatgtaaaatattcattcaacctgaaagaacattgatgattccagaccatttaaagttaaatattttagagttctcaattatttctatttggatgagtagaaccttttttcagacttcaggaatatatgtttagtttttaacagactaattgttcctgctttcatgccagcctcatgggcatcagcaggttcaaggttagtaggtaggaatctgccccctaagaatgcagcctaagagttaaggaatgcatgattacccctgtaattacttgagaggggctctgaaattctggcagggttggtgaggccaccagataacactgatcaagaatgtacacgaggttaggaattcagactgtagctgaagtggggagttcgggtaaacaggctctgaatggaaaagatcaggaattcaaatagacagttaagtcaagaaaccaacatcttagaaatgtaaacctcactttaagtcaaaggctctccaagctaagacttcataatatatttgccaaggcaagagctagtatctgcttacctgagtggtcctggagctgcggccagttgaaacaggagattgcagatggaatgtcagttagaatactttcagaggccagtaacagatacctgactttaaagttcttaagtttgtctttcccaaggttttctggtcataagaatcaccaggggcacttgattaaattattaattcacaagccccttcactggagattctgatgcaatagacttgggaatatatttttttttaacacgaactccagtggaatcaggcaagaagtgaaaaccctatcgttaataatagacacattagaaataatagagacatttgataatctagcacagttcccaaactttagtatgcatcagaatcccctgggggcttgttaaactacaggctggcaggctgctcccagcgtttctgatgcagtaggtccagcgtggagtccgagattctacatttctagtaggttgccaagttatgctgctactcctgtggtcaggaactgcactttgagaaccactaatcaaaataaactgaagtccaaagaccatcagacctagagctggttaattcaacagattagctatatcaagacttgaggtcagcttctctgggattctcttgtctttttcctcatggtcccaagatggcttcccactgcgccaagcaacatatccgcagacaacaataaccaaggcaagaaggaataaggttcaaggataactgtattgtgtgcgtgtgtgtgtgtgtgtactcatgcctgtgtgtctgtgtttggaaaagcaaacgtttcccagaagctccccaacaaatttcttcttatgtgtcaactagaactggatctcactgaacctctttaagccaatcactggctatgagaaacaagcttactgtgattggcttagaccagattttaattttttcctcagagctgtgtcctttgttgcccaatatctgaacataattgagcttctttaccaaggaacaagaagtaaatagctgttagttaggcaaatagctgggtatgtccacaaatgggttctgaaacaagtgtgattataatgaggttcagaattgaaaatattagtacaaatgctagtaaataatgtatgatattggctttcttatcaccatttgcaacagaataacagtctcatgaagaatttggcacagccattgtagaaaaagtgccttttcagagctcacagtatgcatgtactcatcttgcttttattatacctgtatatggaattgcaagctgtcccttcaggtaatgaaatttagacaagttggaacctgtataacagcaaatcaatactgaaattataggcaaagcctgtacttgtgcagactaacacataggatagaaagactttgtgatcaaaattcaacaaatcccacatttataggtatccaacatagagagaaaactatatatagtggtgtgtctttttatgtgtttgcgtttttctccttattcattcctgaaagtgtattttcttttaacagactcacaactcagctacaccccatatgcccacagtcaacacagtggaaaactgagttgtttatttgagcctcaagtcatccaaatacttcgttaaacgttgtagtaaaaggtctcccctgaattcaaggaggatgccctaagttttctgcatccttttgatagaggaaagtattaactaatgtcagactatctgttgttttattttcctttacagcactagattttgttaaggacattgataattttgaaagagaagctaagctaaggtgacaaatatatcttctgttggtcaatatctaaaattatgtattatttcttttttgactacaccttacagtggttagtttgcactttacgtaaaaaactgatgtctaccatcttccatctttgtaagcaccatccagcctaatagttgttggtttgaataatgccacaagctttgtccagaaaccaaaaacctgatttccaaagactagtctatgtagctgagcccttcattccataatcattaaactatggttaggacacagtatccagtctcccctcaaccttgtccaatcacagtctatgcagagatcatgtaactcgattaaaatctagaaccatagagacatttcccttccctggggcaaatgggaattgcacatgggggaaaatggtgtggataagcaaaaaacggaagtttccaaagtgcaacagaatattgataattttagtacatttcaacatacagtgagtgtaatgacggcattttcctactgcttccttagttgtgaagattttgttttttcttctgggttcactgccgggaaaagagcagaaaatgttttagagcctctgccagcagagggggcatttaccatttgtgcataaggtctctggcactgtgccctggggttctcttttctatatgtttctaacagtcacacacagcagtgtgactgtttacagatactttaccgtcttctctgattgaagcagggactggtttgccagcaacttttggttgtttttgtttttttgaagaccatgcaactaacagatgtttgttgttggctccatatctacattctttgaaagctggagaatcaaattgctgacattcagacaacactaattcccatatccagggagcctaatttgccgtccctgagatcctgattcctggtgttcacgggtttaaaaaccatttcagtgacacaatataagaatgggcttgggagatgcagcgctgtctccactaaagataatcacattttataaacatctgcgtcattactggtatgattcatctctaagctgtatacagctgtgtttccagtttcaattaacaatcccttaattgcatatccatctcatgttactaatttagttaatttattcataattaagagtattctgttttctaccaaggtttgtcgagctcagaacattataaagaaaaatattttaaggcagcatctccgagggattttgtttcttataatcacatcacagtaaaatgtcattcatgcgcccaaaggaagatgaattgctaagggatttttttttccagtaaaataagaagctttgggaagctgcagtgtgttgtgtttttaaaccaagttaaatgcgatgcattttgttcttttctttctccttccctgacatcctctcaaaaaaattatcattttatttgtattattgcttaagtatcacagcaaatccagtcaccagtgcaaataaaactgtcattaccctgtcaggtaatggtgtctcttaaaatctaagctataaagtctgtacattttagaggacattaagatcaagaatttttaaattgcctaagtctaagcaagtggagtacacccttgtggaaaatggaaggcagatgaaaacatgatgccaggcagtgaattcattttagtttgatcttttctacaaaaatacatatatccgtgcagcaagagtcttgcctgtgttagtacatgtgtctgtgtgtcattcaaagcagcaataacaaaaaattaagaccatttctcactttgtttattgttcaagaactcccacctatagccttgacctgtgtttgagcttaaaaaaaaaaaaagtcttataactgcccagtggtttggagattttacacaatagaaataataagccatcttttgcctcacatgaattctactaaaatcaaaactccataggatactttccaaagtaactggtgaaaggaaaagtgtggtagtataggtatgcatattatccccatcactttatttctgagctcttctattttttaaaaattttaatttgtatcttaaaagggcaaaacataagaagaggtaggagtattctaaatttcagtgacaacaaattcatttattttacaatttaaccattgcccgtcaacatttacttaaaatttcagcatgggaggttttaaacacttctagagtcccatcttaccccatttccacgatgcttttcttctccatgtgttgctgcagtttaatattgtctgcgtgttttaatatgttaaacgagttaaacatagagtaggaagttaaaactgttagcagctatatgtttcccaagattgatgaaaattcaggtaacactccaacctgttaaagatacctgcaatctggccaggtgcggtggcccatgcctataatcccagcactttgagaggccaaggcaggcagatcacctgaggccaggagttcgagaccagcttggccaacatggtgaaaccccgtctctactaaaaatacaaaaaacatttagccgggtgtggtggcatgcacccatagtcccagctactcgggaggctgaggtgggagaattgcttgaacccggagcctgggtgacagagtaagactctgtctcaaaaagaaaaagaaaaaaaaaaatatatatatatatatgtgtgtgtgtttatatatatatatatgtgtgtgtatatatacatatatatatgtgtatatatatatgtgtatatatatatatatatgtgtgtgtgtatatatatatatatatatgtgtgtgtgtgtgtatatatatatatagaaagagagagagagagagagagagagagtaagcagggaggggttgaagccagaaaagactagaaattatctaggccaaaccctttaatttatagattaggaaatagtttctggttgacttagctgagacgttctcatttgttaaaagcaagatcagaaatcagacacaattcaacgctcttcactacaccttgtttttctctttgtggaaaacaagacgtatcctgttcaaaaatttatgctgtttatctgaaagcccaaaatgcctgtttacatcatattttccattttgcaatagcagctcattttggggattattttctgatgaaatctctaggtttagttgtacttgaatatctttttatctgtacacactggaatatgcatataataattgatagaaatgtggattttaaaagtagagatgatcattattattttatgatcctttaagttaataaaattcacctagaataaaataaacaagtttaactaaagttctcgcattttcccagaaatcgtagactagaaactagtcttatttgcttattttattccaaagcttattttacctctattattttgtggttctataaaatatttctgtgtattcctccaaagaacctcttggaaaagaaagtaaacatcacatctgaaaaatagctgggcattttttcattatctctgcaaggggaggggacgtgaaaggcaaccccatatagaaactcaactccctgctttttacaatgaatgaagtttttccactgcactgtcagaatggtaattcttgctaactactcacctatttcacaacattaacagagttccaggattcatgctttaatattgcataatggtccatgttttgaacatgaggagtggcagcggagattacactttgattccttggatttcatgtggcactggatgggagcaaggcactgattttaagttgagataaaaaggagaagtcagtcaatgcctgcagccagacaggactcttgtaatagctagggagtatgcctcatttggatatgcatgactgccgggcaaggacactgccatgaatcgctaatggcagcagttgtatgacataagagagatgtgtatcagcaactcacaagttgactttgttacatgttatgaacacattcctgtgggcactcattcatagaagtgagaaatgtggacaccacagtgtcccaggcctttgttaccttatggcctgggaatatcttgctttgctggaacatgaagccacgtctggttataagaagaagtttgatctgggagcaaaattgcctgttcacgcatgtctttctcacttctttaaaactaacttgctataagggtgattaaaaaaaacagatgtcaggtgagagttttgctttgcatcaacttcctacttgtagaggtaataacataaaccttgcctggcaatcattatttgtcatccagctgagggtgtttactcttgagaaagaagtaatggacaaaattgacttggattctggttctatgtttcccattaattgactctggacatatacatgcaatttaatccatcttactaaaaacatgaccaactcacaggatgtaaattctattctatagaaagggctttccctcagtagttagtcaagggacggttcctaactcctgtctttattgagcttattttccaaaataaatgtattattttctactttgttcacagagcaaggcagcataaagaaattaagcaacaaaacaatagtgtatttttacccaactttctagaaaacacccatttttcttaagttttgatatttttttgccaacaggcagtcaaaaagaagataaataaaactgggttaagttggtaatgacacaataaataaatgagatgaagaaagaggcaataaatatgagtggataccaacaagaaacatgttcaagccctgaaaaaataatgagaaaaggtagaactattaataatacatcccgctctcgtatcacaccttgctccccagatacatcctatctgtcctggcaccatgttgatgctgttgttctgtaagctatgccaatgaacatgttggatgacctactccagctctacctcaagatttccaaataagaaaaggacccagggatctccttgctgaggtctttatccatttactcaggtcacaagtactaattaagcagctcttatgtgcaaaatgttattgcttcaggtcagtttttcctatactgctgttctataagagaggaagaaggtccctgccctcagaaagccctagaatacagatctagagatgggttcaacatctttgttatgcaattatttcattccaattgtaatgagtacttagaaaggacaaaagcagagtgctgagagagtataacagagggacttgacctggtgtagtaggcctggaaagtttcctggggaagtggtattttagacaaacaacacacacatacacccatgaatgtatacgtgtggagaatgtattctaagtaactatgatgaatgtatttcttactgtaggtcatggtcaaagtttgaaaactattgttctaactagtattataattccagggatagtagaggtcatgtgacctgtttagcacatgcctgccttaacagtatctagtaggccaggcaatgtggctcacacctgtaatcccagcactttgggaggccaaggcaggtggatcacttgaggccaggagtctgagaccagcctggccaccacggtgaaaccgtgtctctgctaaaaatacaaaaattagccaggtgtggtggtggtgcctgtagtcccatctactggggaggctgaggcaggagaattgcttgaacccgggaggcggaagttgccgtgagctgagatcatgccactgcactccggcctgggccacagagtgagactctctggaaaaaaacaaaaaacaaaaaaaaagaatgtctagtaaataagtcagtgccaagcaactacctgataactgttaccaccttagtcatcaccgaaggcagaaggtcttgcattcattggaggagagttaccaatctaagacatttgcatgaaaatgtgcacagagccctcacctgataatcaaagcatgttccaacacttctctttggataaaataagagttacatctcaatgaaatcacttgtggatcaagttctcatcctttcgtaaataaagagaggggcagcaagaaatggaagtgagcacatataagtgtgggaacctgtactttcctaacctataaagcattggatgtagtttttgctattggtgcgcatggagtcatgtggccttggagcagttaggtaccttccctgatgataggggagaaggcaaagaaattgatgatacatctctctcattgtcattccctagtatattacacttaaatctaactgccctattttgtgattgccttactgctgtggcttgaatatttgtgtctccccaaaattcatatgtggaaacctaattccatatatgatggtattaggaggtaggccccttgggaggtgattagatcatgagggcagagcccacatgaatgagattagaacccttataaaagagacccagagagctgctttgccctttttgccatgagaacacaagaaggtgctatctatgaacaagaaagcaggccttcaccaaacactgaatctgccagcgccttgatatcagacttcctagccttcagaattgtgagaaaaaaactttggttgtctataagccacccagtttatgatattttgttatagcattccaacggactaaaacattcattttccagaaaatctactccatttataagccagcattcttttttttttttttttaattttctacagatctctgcagaaacatgcagagtaataatagggccaggcacggtggctcacgcctgtaatcccagcactttgggaggccacagtgggtggatcacctgaggtcaggagttcgagaccagcctggccaacatggtggaaccccgtctctactaaaaatacaaaaaattagccgggcatggtggtgggtacctataatcctagctactcaggaggctgaggcaggagaatcacttgaactcaggaggcagaggttgcagtgagccaagatcccaccattgcactctagcctggacaagaatagtgaaactgtctccaaaaaaaaaaaaaagaagtgataatatatttgctgtatatattagttatagatagttatattgcagtactatcagaagctatgccacatattatttacgtatttcttaagatatagaaaacatccctcccctgcagtcattagtacttttgcattcaaacttcaaatgaaacaggactttagaaattataggcttggtgccatcctggccaacatggtgaaactcgtctctactaaaaatacaaaaattagctgggcgtggtggtgcacacccgtagtcccagctactcgggaggctgaggcaggagaatcacttgaacctgggaggaggaggttgcagtgagccgagatcgcgccactgcactccagcctggcgacagagcgagactccgtctcaaaaaaaaaagaaaaaaaagaaaaaaagaaaagaaaaaagaaattataggcttggtgatttctcaggcattaactcaagaaagcagcctttataccgattacctacattcacccagcacttaccccattaatttctaatgttgcttggaacaaatgaacattcctggaatgcaagctaaatgaaagagccccgaagaagaacagggcatttcctggttcctcatattgacaaatttaaaagcctgtgctataatatgggctcctgtttcctttcaagtttgtctttgaataagtggacagagtagctgaaagcagagtatttaaagctttgaaacgaccactttatttcagtctctgttcttgctgggaccactcttataaatgaggagattagaaaatcacctagaactatttaatcgttgtgcagaagaccctcttaccccaaatatttacttaccgctcattttattggcacactgcctcaaattccacctgctgtgaactgacctaagtgaatttaggtcacgtgcaactattaggttctttttgggaaataatggagaaccacagatgtgtttgaggtggatgaggaatggctacctcaagccgcagcttcatgcttcatgctgaagtcctccacaagtgcaatcatgtcgttaaccaacatttgttagaaggcaggcagaagtcagcttacagcctgttctacaatttttatgaagtgtaggattttaggcttaaattgacaccattgcaaatacagtattctcttacctttagatttggcatcaggtcacaagaattcttcctaagccaatggttggatacaaggccattggagaccagacgtaaaattaaaagcccaagcaacaggttttgctggattcttatatcctgtttatgcaatgttaggggatgtcattaaaatattttagttaatccatgtatcttgattgtcttaaattttactaatgagatcctatagggatattcattgcaatccactatttccctcagcaaaaacacatttgcgatatctattacatgcattacaaaatcctccaaggttcacagagatatatagtagtagcagtctctgggttttggcctttttcataagatgaaggctgtgctgtcctagaatatgaattcctaattaaaataaccatttgcctcaagcctctagagttgaaggttgcactaactgcacatataaaatatccaactatctatgttgagatatttaaaattaattacagatattgtaacaccattatttaacttaaattccattacaggtcctttgagtatgcaaaatatttctttgagatgtggtaacccctttaactgatcaggaaataaacctttattatcaagttgttatcccaccttgacaggcctaaagcgcagaccacatatcagaatcccctgggcagcttataaagctcctcatgcccaggctgcatctcagaccaattcaatctctgggggtgggctccaagcatcagcatttgttgaaaatccccaggattacaaagtgcggtgaagtttgcaaacccttgtaataagagaatgggaggagggatggctgtttgccaagcagaaccaggaatgaggaaggatattggtaaacaaaatttatccataattgacttttcatgaatcacagtcctactgagacccagccttgtctcatgagactttggctacgatgatgagtgagaaaaggactcctcctaatttaccagactcttgattagaagcaaatgaaattttggaaaagagacaagtcactttcaaaagaccccagcctgtacctgaccctacctctggactccatagtaatggcaggtagtggtcattcctggagtaactctgtatttcttaaaggaacatttgcataatgaacctacagcaatctggaagacgactggggtaaatagagaatttgttgattttagatggctgaatactatccgtgcagagcaattaaaaggacaactgtcagaatcaagtaagagaaaggaaataagagaagtctcatgttagtagaccttgtttgatcaatgtgttttcatcttgtatatgattaataaaataagtttgggagttaggatcaacctttgtttactcactggagaataacttgcatatagaatgaagctgggattgtccaggctggtttttttccatttggaagtttggatacaatacaaggaagcctgaattccaaactgtttctcttaaagagtgcctttctgagccgctattaaggaatgcttattgtttcgaaaatggtagcacagaagtgttataactagagtacaccttgtgcctgcaattaattacccagtgtcttcaaaaattcttgtcttttgctggtagaaaacctttgaaactatagttgtctgtggtattcactgcagcaccttagatataaagagagaaatttattttcagaggaatcttgagacagtttgtgtgtgtgtgtgcatgcctgcttacacatctattggttttccccaaggattgtagaaatcccattaaaattccagcttcttaaggagctactgaaactccagtttttcatattttcttttataatatttggatgcgtttaggtaaacttgcagcattttaattatgtctgtatcagatgagcggaagaaatgtaaaagggtttggggagagatttaattttagatagcggcgtaattaatagcatttggaaaaactagtggaactttaattaaatgtctctacattaatttagtcatttaattgaacatgtagtgggatagtccttacaatttttcacccttactctttgaggaaaaatgatttttgaataacaaagcatcagtatgactactttttattatttagctgtatgttcactacttggcactttgtttaatttttccccccatatgtttcgagctttttaaaacattaatttggcttgtcgcttttatcttaaaaactataaatctgggggccgggtgcagtggctcatgcctgtaatcccagcactttgggaggccgaggtgggtagatcatttgatgtcaggagttcaagaccagcctgaccaacatgacgaaaccctgtctctactgaatacaaaaaaaactagccgggtgtggtggtgcatgcctgtaatcccagctacttgggaggctgaggcaggagaattgctggaacccagggggctaaggttgcagtgagcagatattgcaccactgcactccagcctgggcaacagagtgaaactccatctcaaaaaataataataaaataaagaaataaagaaaactataaatctgggagaaaccgtatttggaaacattgagcaactgtttcttttcctttattttagactttaatattcactagagtcatgttgtaaagttttcaccttaatattgtaggctttttttttttttttactttgccaacttaactggcttttttaaagtggtgttatgctgcagcagtgtatctgaatttcagcagtgccttttacgtggctgctcacaatcttattaaactacatgaattatacatggagagaaatataatttggtaaatttggtgatgtttcaataaccatgcccaaggaggaatgttgtgttaaactgtcaatttgagaagtgttttgtggtgctaaccacagagtgaattcagttctacttcatttcacaaccctccataaatagtgccccctaaaagtggtgcctccttgcctgtactttgacccagatttttgtcatttttctagataagcatatacattgtgcacttattaatttttcaaatgacacaaaggtgagaatgggagtcaacacactgaaagatcaaaatcaagactcaaaataagattataacagactgggatactgtaccaaaataaaaaaattaaaataaaatttaacaagaacaagcaagatgtcctgcctttaagatttttaaagtcttttgtacaaatataggctgaggaacatctgactttgtggcgctttatatgaaaaacaaattgggattttaaataaccacaaggactgtattaatctccagtatgatctggtgtggcttactgtacgaggcaatacagtattagattgcattaatgaaattcacaaatgttccattaatctcttcactagttaaaccacatctgcagtcatattgacttatgagcatcacgtatgatgagaacactgaaaaatcataatacattgacagcagggcaaccaagattgtgaaaggtatagcgatggttatatgacaaatatttgaaagaatctagaatgttcagtaagaagataacatgaaaatacaggacagcttcttcatgcatctggggagggtgggtaaaggacacagcacacttaattaagtaagattgtagaagagaactatgggcaagtgttacagtggagcttactctgagtaaggaaaatgtaaacgttagagttgttattaagtggcatgggctgcttcacaaatttccatcattttttaatctgattcatctgctaataggacaaactgtaacaatagcttaaacaatagagaaatgtaggtctctctcatgtacaagcccagaactaggtagatcaggcctccttccgctattctgcttcactaagtccgaagtcctcctttaccttgtcctgccatggtggcctcaattctcgttgtcaccacatggtccaatatgtctgcttcagctccagccaacacatctgagttccagcccccagcaacatggaagaaggaaggaggcacagagagggcgtgtgccagcagtgttgtgagaaaatctttcagaaactgtcatgaaatgtatcccctgatagttccttcaccagaactttgtcccatgattatatttacatctatgtgaggctaagaaatatattctttccttcaggcatctacatacccaactgaaaattatgagttctattgccacaagaaaaaatggaaaatatatggggacaatcaacagtacttgcacaaagatgttttacagagaattactcttttacctgggaattttacaagataaactttaagatcctatcaactctctctctctctttttttttttttttttttttgagacaagagtctcgctctgtcacccaggctggaatgtagtggtgcgatctcggctcactgtaacctccacctcccgggttcaagtgattcttctgcctcagcctcccgagtagctgggactgcaggcgcccgccaccatgcctggctaatttttgtatttttagtagagacggggtttcaccgtgttggccaggctggtctcgaactcctgacctcaggtgactcgcccgcctcgacctccctaagtgctgggattgggattacaggcatgagccaccacgcccagccagatcatctctggaggcagggggatcacttgaggtcaggagtttgaggccagtccggccaacatgacgaaaccctgtctctactaaaagtacaaaaattagctgggtgtggtggcaggcaactgtagtcccagctactcgggaggctgaggcaggagaatagcttgaacccaggaggccaaggttacagtgagccgagatcgtgccactgcactccagcctgggtgacagtgagactctaactcaaaaaacaaacaaaaagagtctatgatcctataatttatagacaacatacaacctcctttctctacaaagagaattggttctcaagggctgtttggaaattcatttccttttaagtccaaaatgacatacaaaagtgaccaatatatacaatgtacacccttctacaataagttctcttttgttgccgtagtaatcgcatgtcttttcttaaaggaacacttttttgactcttttgtacttttgaacatagcggtgttaataataatatttataaaacattatgaaaatatgcacacaaaacacaacacaggctaagaaaacctaatggtggcctaaagtaagttctgatgtcctctgttggtggtattcttcattgccatgcttctgctgtgcctgggacctttattgctacctatgggaagttgtaagtagagaagtttctttactacagggatgtgaacaatcattgtaagtaaggaataatgaattcacataagttcacagagcatgtttttctgccctggtaatactgcatttctcactttgcatttaaagtacctacgcccttacacagaaaaagttatcggggttgggtgcagtggctcacgcctgtaatcccaacactttgggaggccgaagcagggggatcacttgaggtcaggagttcgagaccagcctgggcaacatggtgacaccctgtctctactgaaaaaaaaaaaaaaaaaaaaaaacacacacacagaaaaattagccaggtatggcggtacatgcctgtagtcccagctacttgggaggctgatgtggaagaatcgcttgaacctgagaggtggaggttgcagtgagccgagatcgcaccacttcactccagcctgagtgacagagtgagattccatctcataaatatataaatatatatatataattatcgattgattaatattattatatggtccccattactctaaactctcaaaatgtaatgtaggtcaaaatcagaaaaaggccatactgtctactccttcctctgtttcattccaactataagagaaagggagagggcaaaacaaagatgacaggaggccaaattgtacatagaattcatggaaattcttacccaacatgtaaaattatgatagtataaggaaaagtatactgcaaaaattaaacttctacattgtgaaatggagaacatttttacatctagctctattgcttctccctgtggagctgttctaagcacaaagttcccattacataatgaacaactccttaaatactgtgcaactatttctcactagaagcacgatgcagcaaactctgtttctcagtaaccatttatatcatacctagtggtaccgagttctataataaaagggtgatatgtgcatattttgtggtcatagagtgcaaagttgacatctacagtttaaagcattgcattgcatgaataaggtcaaaatttaaatacttttctatgatcatgttctttacattaaaggttaaagatgcatgccgctttaaaaatggtttaagggccggacacggtgactcacgtctataatcctggcactttgggaggctgaggtgggcagatcacccgaggtcagacgttcaagaccagcctggccaacatggcaaaaccctgtctctactaaaaaatacaaaaattagtcaggcatggtggcgggcgcctgtaatcccagctactcgggaggctgaggcaggacaatctctggaacccggaaggcagaggttgcagtgagcagagatcgtgtcactgccctccagcctgggcgatagagcaagactctatctatctcaaaaaaataaatgaataaaataaaataaaaatggtttaagaacttcaaaccatctggcaccagaaaacacctaaattgaattaaaaatctggaaatttaatttcacaacttgtcctttttcaagcctaccctaagttttgtttacttaatggggagaatctgttttatttgttcctatgtagaagactgctgattttatcatgattgtattagggcccaaggatatttaaaatatttcagtagctattacttatactttatatctgcattgcactttagagttgactgagcattttcaaagtattatcttaccaaattgccacaatagtcttgagaggctagtaaatcatgggagaagcccccatttccccactggaaagcagagaaaacccccattgtagtaaaggaggggttccctccagagctcttgtggttgtgttgaggaggaagtattaatgctgctgggcatgacttacaagaaataagtcaattcacttaagcaaaagtgctatgatcctgtataccatgtgagcagctctaggatggggtcacccagcattttggagcagacattagaacatctggagggagtaaacgcaaagaaaatgggctagatacctttccttggatgggaaaggataacattaagataccaagatcaaatgttcaaagagcacatatacaccagagaatactatgcagccataaaaaatgatgaattcatgtcctttgtagggacatggatgaagctggaaaccatcattctcagcaaactatcacaaggaccaaaaaccaaacaccccatgttctcactcataggtgggaattgaacaatgagaacacatggacaaaggaaggggaacatcacacaccggggaatgttttggggttgggggagtggggagggatagcattaggagatatacgtaacgctaaatgatgagttaatgggtgcagcacaccagcatggcacatgtatacatatgtaacaaacctgcacgttgtgcacatgtaccctaaaactttaagtataataataataaaattttttgtaaaagcattgtataataaaagtagtaagataaaccagtaaaaacaaaacaaaacaaaacaaaacaaaaaaaagttcaaagaggccgggtgcagtggctcacgcctgtaatcccagcactttgggaggccgaggcaggcggatcacttgaagtcaggacttcgagaccagcctggccaacacggtgaaacctcgtttccactaaaaatacaaaaattagctggatatgatggtgcgtacctgtaatcccagctacactgaggcatgagaatcacttaaacctgggaggcagaggttgcagtgagctgagattgcaccactgcactctaatgtgggcaacaaagcaagactctgtctcaaattaaaaaaaaaaaaagtttaaagaaaaataagttatttctccatgcttcaggagatatgtttcgcaggagaaagaggcttaatagagaaaacagatccctacaaacatttgtggtttttaaaactgccccattggttactaagtggataacatgagcgtgatgccagattcagtactctagtgagccatgcagctttgctgtgctctgcacctgatgagtgtggcctcacttcttataaatgcctgtcattgctaacaggggtccttgctgaaacaacagggctggactaatgctctagttcccttcctggaaaacctatcccaaagctgagatcctcatgatgccttctctcatatatgaatgattgcaggttacgctatcatcattaaatcgaaacattttagaccactttgcgtttgtttgtttgtttgtctcattatgtccagttttatcctgtttcataatttaataaatttttattgggtctgtcttctggttaaatgttgtgtgtataaaaaataaagtcaagagagagaacaggagttatggaactaatgacaaatccatccttcagctaaataaaattatactatggatgatttgagctgtacgttgagtgataatttttaaaaataagatagatcgggtgcggtggctcatgcctaaaatcccagcactttgagaggccgaggcggatggatcacgaggtcaggagttcgagaccatcctggctaacatggtgaaaccccatctctacttaaaaaaaaaaaaatacaaaaaattagccaggcgtggtggtgggtgcctgtagtcccagctactcgggaggctgaggcaggagaatggcgtgaacccgggaggtgaagctcgcagtgagccaagattgcaccactgcactccagcctgggcaacagagccagactctgtctcaaaaaaaaaaagaaaaaaaaaaagggccaagcatgctggctcacacctgtaatcccagcactttgagaggccgaggtgggtggatcacctgaggtcaggaattcgagaccagcctggccaacatagtgaaaccctgtctctactaaaaatacaaaaaattagctggacgtggtgacaggcacctgtaatcacagctactacggaggctgaggcaggagaattgcttgaacccaggaggcagaggttgcagtgagccgagattgtgccattgcactccagcctgggcaacaagaacgaaactctgtctcaaataaaatgaaataaaataataataaaaaataagataaagtatcacaagtaagatgtagttgaaacttcatgcatttttctatgatgcctatgatattcaaaagataactgaatttcatgagcagagttcaagaacttctgagtatacttttcattgatgacttaatgtaatggatttctatgatgatggcactatattcttttggtgtttatggtattaataaaaaattgtggtaaagcttgtggaaatgaacatgccttggattagggtgccttaaatgtgcctttgtaaatgcagctaggagactccaagtcacccttctagtctaactgctactcctttcttttacaaactacatgccaactaaactgaccttgatctgtttatgaaaaggcggtataggaacaggggctctgcaattggacagatccaattctaatcaatccactccattgatagatatataaccttgagtccttcctgtgcctcagtttcctcatctgtaaaatggaattaaaaaccaacttcgtgaggcttttggagaatgaaaatgacataactcaaagattattgggtatcagaaacaataatgttatctatcactgtctttactgttattattattattgtcattattattattttctctacctggaacaccaattccacaaactcttaatgtcaagaccatgctgtatcatggagccttccctgattcctccatatgaaaataattaattctcatattaataatattacttttctagttgtattttctttttttagcttttattttaggtttgacggtacatgtgaaggtttgttacataggtaaacacatgtcatggaggtttgttgtacacattattttatcacccagatattaagcccagtactcaatagttatcttttctgcctactcgtattttcattatccccaagtatactatacatatcttaaaattaggatccatgttgaaaaaacattgatatttcctatggcttctaacacagtacattgcacttagatattcagcaactctgtattgaatgtatgggtacaatctgctcttagtttctaatttggtattaatatgttcaagcctcaagagctcatgtaaatgatggtttgactatattgcccatcttttgttaagttgaaaagctgaaattcatgcactgtttgttagtgtagtaatttgtgacaacgtctagctattaagtcttttctaggtataaaacctttatatctgtcattgttcccctcttgtgtttttgctttaatatcgttgaaagcatctattattggaactttcacttctgaatagtacttttgagaacctgtatagaatttcagaggccttagaaaattgtcatagattgcttttagtatatggtttaccactgtggtctcttaacttttcaaaaagtatttccaaagggcacttacatccataagtggaaattgatttacatctattattgctgattgttcactattctgaacttcggctaaacaggtgatttaggcagaatttttttaaatattagattttttcctactttctaaatattttgtagctctttcttattaatttgagtcaacttatgctcgcttttttttgtcaattatagatggttgtcaggggtttggcaaatgtcatatgaaggtaattctttaaaagttgggatttttgaactgtttatttctactacttttgattttgctggaaattatcattctattaaagggacaaaagggtgctcagaaatatgcattgaaaaatttcttacagatttatcaaccattgccctcaggcactgatattcagccagtatgttccaatacatccatgtctttccattttaaaccttttaattctgttctaatttttcattgcctgtgcctgattgttctgtatccatctgatacgaatggttaagtacaacattttaaatatcactcttgcctatacatattatttttcttgtcagatgatataattgtagtcattacatgtttcttaagcacaactgaaatcttaatttaaatcaataagtcttgtttctgtggccattgtttcccagaactctccggatttctaagcatggtggttattcttccaggaatagtgccgagagtcttcagcagcatgcatttctctctaattgacattatttcacactctccattttccttactattgaaaactgtatttcattggtattttgccaaggatcctgctctgtttcataataatgttctgttcgcactctctgcactgacaaatacctattccatgcatcaattgcataaatggcaatttgaaagcatttaaccacagctggatatttttcattgattcttttcatctgaagatcattcattaggcttctccctcctgtttcttctcacatccatacctcctttcctcctatgtacatagtgtcttttgcattttctgtatttaagtgtaaattgctgactacagttatgcttttacctcattccatggtcataatgaaatcacaaatttaaaaatgtactactttttaaacctgttttctgacttgtccatctaaatgcaattttataattcttcgacattcagcctcctggtgaatgatttctgcaatctctccaagacatctgtgcagtgttatggattatattgattgcattttgtccatgttcaaatttgcagaatgtaacctacagaatatatattgactaataaagaaatgcatccacatggtggatggttgtaaagagaaaatatatattggtgtgcagcaggcgcccacacaaatgaaatctagaaaacagcagcttgccatgtcagagttgcaaatgaaggctgtggctacaaaacacagaaagtctggagtgtatgaaaggtttttcttccaaattcattcacacataaaaatgaaaaaattgaaaaatcatatatgtgcaccttaatttttatatcgcattggtgtttgggcatacgaccctgagattttcataccctcgatttttttaatataaccacctgagcgtttcttcccatggggttactttagaagatggggggtgtacacactacgtatgtatgtcaataaagaaatgaaggaataaaggaggaaagaagtgaagaaggctgggggtaggaagggagggagaaattcagtgattcattacttattcatcatcctaaactggcatataaaataatatgtttaaatcagtctaaaattttcattgtataatctctgaaataactagtccccactccctaaactgtttggtgtaaatatttatctatgtctaatcatttctatgcaaaatagccttatatatattttcattttcataagatcatctaagaatcaaaggaaaagctattttaggcaatgaacataggcagtgatttcaaaatagaatttgagaaatgcaaggatagatggaatcacaaaagatgatctcattcatggtgttttaaaccctacaaatagatttctgtttagttgacctcatttcaatagcttctcatttttttcagaagtgtatttgatgtgtatatttctaataaacttatttttctttttgtacccagtattaaggagcacagcatttatatccactgaacaaaggataactgaaaggaaactccttgatatccaacttggagtatttgtttctcgaatgaatatgagtttatataagtagtttttttcacatacataaaattagaatttgtttgtattattgatattatttcagaacagcggatttaacgtcatagatgatctagatgtgtcctttccttagaaatctttaaaatgaatcacatagtctagaaacagatccagatactacatgctctcatcagaaaggactttcttctcttcgtgtcaagttcagtgttggcaccgtatagacaaagcgtgttaaaatagcagggttcttgttctctgacacattacaagagaggcaagattataaaactgctatgtgtctcattataattcccattagtttcatttgcttcaaaacattcacttctgtgctttttgcaaaagctttcaaacttattttttgatgattctaaaagtaattcttctatgtcttttcctagtgatactagcattagttttcttttccaattgtactaggaggcatgagagattatcgatgccctattttcttgtctaaataggcaacccaaataatcatagtgacctgttcatttatattatctttatttcttgcctcatacttcttcatatttcttcatttcccatgtttccttattctttggagccagaaacgatcacgttaatcactctttccattagttttctcctatacattttctgatctttctctgagccagttaagagtcattcagccatttgataatggacactagtttactttgaccttgcaaacacaaataccctgtttgatctttatttgctgagagcagtaagacagaagaattacaataaactttttagcacccttctgttcaattctttttcagaaatcgttccctcaaaaagcctattctaggctctttcttttggcagtttcctagaattttcctttgcttttcaccaactggaacattatcactagaagtaaactaagggaccatctaattcaacaccctcgttttgtactttaggatactgaagccaagagaagctaatttttttgcctgccataacacaactagttagtgaagcagccaaaactataagggatcttgccaccataagctttatcggcccatccgtttatctcctcaaagcagccctatacctgatttccttatttctgttctctaagtaagccaagctcagaccttagagtgaccttcccctaatccaccctgcctgacatccaataaactgacaaatccagttgattatgaagctacagtgtttttcaaaccataccataattgtctaggctgttgccatgctctacacaccagttttcttattccagtccctccctgccccagtcccagttcactctactcagcctctctactgcaatggataaaatcacagtttccagattcacaaagctcacagctctgccactttctagccttgtatttgtgtttcagttgctgctgaaactctctaagcctattttccatctataaaatggaaaccaacccagaggctcgttgtattacagagatattgcatgaaaagcatttagcgcagtgtctggcccataagaagtcctcagtaaatagtagtcttggggaagcagtagggtgttgtagtaagagagcagagcaggggacagcaaactacaggtctcagtacaaattcaacatggggcctgggttttttttaatagcaggggagctaaaaacagtttacttgttttaataagttgtacgaaacccaaagaagaatatgtaacggagatttatgtgttcctcaaagccagaaatatttactttctggccctttacagagaactttcattaattcctgttgacagctgtcagggtatgaatcctctctaccacttagaaactgtgtaaccttgggcaaatgttttaacctctccaaggtttggtttccctgactgtgaatagtacctatgttacagggttgttatgagaattaaatgagatcatttatatcaggtgcttagctcactagctgaaataggatttaataaatgttagctgacatggttacgtctactcattgttgcagataaatagcctctaagtgcagctttaatagtgattgtttcttaaaatttttgaacaaagtttttctatttcttatccaattaaataaatattccacattctggcattcaatatttctaacgacatcaagcaactctaaaatcattgaatgttttaaagcaacaggaaaccttagaaataactcatctaaactcatatcatagatatggaaactaagggccaataaaaccaaggcttctaggacctgaaatcagatcctctctttttaggtagtgtgatcttcatcgtgcttctgccatgcaatctcagaatttaaagggatttaagaatcattcattttcttcctaaggcaggattcgaccctataaaatccctgtcagtttggtcattcaaacccagtttgagtacagtcattgatgataaatcacccttttcccagggagcagttctggttgtttcaaagtctttataataaatgaaaattggctttcctgaaatctctatatattgatctattcctgcccactggagccaaagagaaacgtcacttctctacatctgtaaaatactcgttgtcaattttcgtatcttctctaagcatcctcgtttcaagctgatgtgaactagttgggtttttgattgttttcattgtcctgctaagtcgaaaagctaagaaaagcttggctctttcatcactgttatatatcccactgtgtaacagaacttgagttcagggtatacactctaaataactgcttttgtaaaagtattcaattatattgatttttttcgttccctctgttgttcctcataattaccctcagtcaagactttcatcttcgtctttatcttcctctgcaagaattaacagtggtcccttttgtgaacttcaaatatctgagactggtctcagttaatttaggaagtttattttgccaaggttgagaatatgcacccatgaaacagcctcaggaggttctaacgacatgtgcccaaggtgtttggggcacagcttggttttatatatatttagggagacatgagacatcaaccaatatatgtaagatgtacatttgttccatccagaagggtgggacaacttgaagcaaggaggggcttccaggtcacaggtaggtgagagataaatggttgcattcttttgagtatctgattcgcctttccaaaggaggcaatcagataagcatctatctcagtgagcagagggatgactttgaatagaatgggagacaggtttgccctaagcagttcccagcttgacttttccctttagtttggtgattttgaggccccaagatttattttcctttcacactttcaatataagctatccagaactgatgataatattccagatatggcccaaccaatggaaatgattgtgtttcctacataccatatcacaatcaaacctgttttgcaccttgcatttactttctttattaatgatgtcattgcaatttagaaaatttggggccacatttacttcttcctctctattatcttcagtttttatttggtcactaaattctgtttgctgactcttatatctaaaaataaaaacactcaaatccagctattcctctctaactactctgcccttccctcagtcctttctcagtgactattaatgatttggccttctaatgattagcctccctgtccccagacttttatccatctttatcactatggctagttatcttgctaaacaacagatctaatcctagtaccccattatattaaaaaaatcttctatagctacagctttctctccctccaggtcagtatccatagcctgtcaagatgtggctttgataaaggacagaaggcagggaaattctgggcagaagagggcaggtccccattgaggacccaccctcaagccaaaaagcctggaaccatggcccaaagtgagaacttacatccctgttttccctcttgaagggtgccttttccaaaaccatccattaccccccacccaccccccaacctgtgcctataaaaaccccagagctcagctggcagaaggaggagaagcagatggatgtcagaaactacagttggacatcaaagagaagcggcttgactttagagggacagtttgacagcatagctttggagaggagtccagctgtggatggtcagactccaggggaagattaccttcccactccatccccttttcagctccccttcccactgagagccactttcattggcaataaaatcccccatatttaccatcttcaatttgttcatgtgacctcattcctcctggatgctggacaagaacttgggtgccatgcgtgtgggtgaaaaaggctgtcacactgaccctccactgagctgttaacacttaagccatctgtgaatggcaaagctaaaagggcgctgtaacacttcctcatgggcaccctcccctagaggctgctgcagggcccgtacggtgttcactcttgccagcactcaaaaatgctggccccagctgctgcacctgctcacctgtgctcccccttccatgaggggtggaccagcgagtgagtggagtttgctcccctccagttcccacccacgaagggatcagggaaatatcctccttcagctccagtgaggcacagtggtatacacctatagtcccaactactgaagaggctgaggtgggaggatctcttgaacccagaagtttgaggctgtaggcactgtggttgtacctgtgaatagccactgccctccagccttggcaacatagcaagatctcatctctaaaaaagaaaaaatatatatgatgtggctccaattcactgatctagcctcttaactgaattccttcctcctggctgggcacagtggcttatgcctgtaatcctagcactttgagaggccaagacaggagaattgcttgagcccaggagttcaagaccagcctgggaaacatagtgagacttcatatctacaacacattttttcaaaaagaattttttcctccctgctccccaccctacccccttgcaaccttatttactcttcggcctctggccctctcgctatgtctttctcagcttcatgcctttgaaaatactctttctatgcctggaaagcccttataaacctggaaattcctattcttattcaactctgagccagtccattttagtggcttagttcagaggctctagatttaaattgcaattctgtcagattctgtctgctttgccaacctcaatcaagttatgtactatgcctcagtttcctcatcagtagaatgaaaataatacagtagtgcttttttcatagggttgtagtgaggattaaatgagatgaagcgtataatcctcatgtacataacacagtacatactatatgtgttgcacatagtaagtgctcagttctttttctttgcattattcttagcacataagtcaagttacatttgctctcccttacgcaaggtcaattgttcttttttatgtgtttacccgttactttgttcatgcatttgttataaccactgccatcataaagcaacttgctatctttgttcataaaacaaatcccagattcactgagctcaaagtgagagaaggaaactttgcattatgtgcagttcctatgcttttctccaaatttcacatctccgttggggatctctcactagttatccttgccatacccccacaccagccttacaattttgcattatgtttcctacatcatgattctaaacggtcctcctgttcgctttctctccatcccatatcgttgcagatagctatttcctctttttaagacagaaacacatttgcattttgcctaagctacatttgtaaattttacagtattttcgaaagacacaatggaatctaggaaagatgcaacagataaagagattaactggccaatttttgagagcaccatccgtaaagtccacgaacaagtgaggcttccttgtcggagaaagcaattcagtcaccataaatgatcattcaagcctgatctcattccctcttgaaactggaaattgaaagcttgttcctctgacagttgtgttgtcagtggatatgcccagtgtgcaaaggactggacaaagggcaaaagtacacatatcccatctggaattctgagtcatccctgagacatcattttggatttgtctactgagatgaaattaaaacatgagtaatcaagcccacacttcttccccctcaaactcatctctttggtatcatcaagaaaatcaaatgctaatagccattgacctcctaattctagtgctcttagctatgataaaacagtcattaacttaatctaaatgttgcaaataaaggagccccatcaaagctgaagccccaaaattatacaaatgagttaactgggaaggcatgggggaaacaacagttttcataagacacactctaaatctagtttattctcttaggaagacttttctcatcaatagagagccacataaagatgccttacctgcctttcacggggactatatcaattggctgtactgtcactcactccaaaactctcaaaatgcctaacacagattcttgattttattgattgcattagatgttacgttttctaaattttcagcaccctggaggtcacctcaggaaatcatgcagtttttgaatgattttccttagaaatacacgtgtagctatacatatgcccatgcgttatttaatcagttagtgaaaggaggaaaacagcatttctattattgacctttctcaatctctgaggagactgtatgtcttgcctacagtccaggattgaaagcaaaagaaaaaggcactgacaaaatagcattttattttaatagcacattatggagagacaaaaaaaaaaaaaaaaaaaaaaaaaccctgggatttcctttgtctaagtagaattgacgtatgggtgagatcagtctctattttactcagtacaagtgcacacatatttatgtacacacatataattgtcatctttgggccgggcgcggtggctcacgcctgtaatcccagcactttgggaggccgaggcgggcggatcacgaggtcaggagatggagaccatcctggctaacacggtgaaaccccgtctctactaaaaatacaaaaaattagccgggcgtggttgcgggcgcctgtagtcccagctactcaggaggctgaggcaggagaatggcgtgaacccgggaggcggagcttgcagtgagccgagatcgcgccactgcactccagcctgggccacagagcgagactccgtctcaaaaaaaaaaaaaaaaaattgtcatctttggaagctaagggccctgtatcagagtatcagaatatacctatatccaggatgcaatgttctccagttttgcattaacatcagctacaaggttcactgccatctaagactaatcaacagtaatagctaaaggacaaaggtcagttcctgagagatatgcctaaattcatctggctatatcttctgttcctcccaaaccctaaccccataaattcttcattgtttagaaggattcatattttttgtttgtttttcatattcccattttattggctggggttagaattgcaatggcagcaaaaaacacagaagctatctacagtggcttaaataaatagagttttatttatctccaatattaagatgtctggaaataaggtgctttgggcccaacagtatcaggactggcatctgtatattttttattgacttttcctcatgcaatatagcagccaccattatttcacagggtgaaaaagagaaggcaaaaagggtgtactatctgagtcttatcatttttataaagccaaaaatttcccagaaaccttttttgaaagacttctacttgtatatcattgtgtagaactgtgtcacatgacagccaccaacaaaaagatggctagggagaagtggttttcaacaggtattgaagtagctaaccggcagtgtctgccggtcttcagttataaacaccagcagctaactctggctaattcaagtcagggaaaacaaaggggatggggtaggggctctttatttaaaagatactcatagaaatgaacgaagtaatttgaaaactaggtctcagaataggacatgaagtataagagttctaaaatctcaaaagcaggaacacatgcatcttctttttaagtgttgtctttgaaatactaagctccaaagtctttccaaccttgtattattttcttcctttgtcagcttcctgagtggcagagtctgagtaacctatggggtctttgaactctttaggggaattgaggaaggcaaaaaggtaccatgattggcagctctactagagtcacaagaaatatggggaaagcgattcctcaaaggaaaaacaaaaacagaaacaacaaccaggcagttagtagaaggatgaaatactggacccacaaagacaacatatgtcttctcaccacacttggtctctctctctctctctctctctcacccttctctctctctcatagtaatgaaactaaagctgcaaaactaaggcctagctattcattgtgatccttatgagatcataaaaaaaatctgtatttaagtggagaaaaataaatggaatatcaactttaaaaaattttttttgagacagagtctcgctccgtggcccagactggagtccaatggcatgatctcagctcactgcaacctctggctcccgggttcaagcaattctcctgcctcagcctcctgagtagctgggactacaggcacgtgccaccacacccagctaatttttgtattttcagtagagacagagtttcaccatgttggccaggctgttccgaaactcctgacctcaggtgatccacccacctcgacctcccaaagtgctgggattacaggcacgagccactgcacccagctggaatatcgatttaattgtaagagaaaaatgcactagtttaaaaatgtgtcctctttatcctcaggttttaaaaatatttttaaggtagtttagaaaaactgaagtgattatttgataaataaatttcaaatgctatcaatggaacaagaatggatattagatatcctgctaacaaggatcatatttttacaagttgtttctccaaagagaacagagctacagctgagattctggtgcgcataaacctttccatcagagctgtagtcacctaacaattcttatatcacaatcttcatatctcaatcccttttccaaataacttcatctttcttaagttgcatacaaatgttataatctaatatttttgagatggatatcatgtgtcataaaaagaaagccattgtaatattaccaataccaagtattagcaaatattgacatagctttagaataaaaataaacagagctcaggttctggctctgccatagctagctagatttatcttaagacttcagtttcctcatatacaaaatgttgatagtatcatcatcttgtaagccttgttgtaaagagcaatttagctaacagtaacagtgtttaacatgcataaagtgaagactcctttctgggctgataagaacgctagtttattcatttgcttatttctatatttttaagcttagagtctgaaaattttcagagtctgggagtcaacgtgtggggtgtgaattggaacttcaccacttactaacaactcccttttgtagtgcttccatttatttatctgttcaataggagtaataatagcactcgctcaaagagttgtctgaggattagatgagacaatgcttgcaaaatgcaaagtggagcacctggtgtatagttggtattcaataatttctagttgttgatatgatgatgacgatgatgatgtattctcttgatatgtgaatgctcatcacaccatcctatggaatatttgattttaagaaaaagttgggtttgttttttttttttgtttttttttttttttgagatggagtctcactctgtcgcccaggccagagtgcagtggcgcaatctcggctcactgcaacctctgtctcctgggtttaagcaattcccctgcctcagcctccagagtagctgggactacaggcgtccgccaccatgcccggctaatttttgtatttttagtggagaccgggtttcaccatatttggccaggctggtctcgaactcctgatcttgtgatccacctgcctcggcctcccaaagtgctgggatgacaggcatgagccaccatgcccagccaagaaaaaatattttaaacaagttaagatcatttactatactgtgccctaagatgaggtgaacatgtagatcatgagatctaattgattttagatgcagttcagttttttaaaagaatgacctgctttccatattaaaatttcaaaacaatgatatgtggagatgatgacagaatatggctgaatgaggtaccttgttatcctcaaccttttggctcagagacctcttccttgctggaaactttcctaaccttttaatgatttattaacattttgcatgcactctttatacctttcattaatgactagttcactgcaaatttttctttgctttatttcctattcttggtgtgacattcattctctatctgtttctatggaagcttttgtgatgcctcagagagaaagaattctgagtctttgaaataatgaaaacattactaaaccataaaacctagatttcaggagcctaatagaggattagagctttattacgtacagccatcttacagtttagccttcaagtctcaattgtggaatgatcttttgtcctttctctccagtgtgcatgtgtgcatacacatatagacacagttcgcgcttcagtcatataaatgggaagccacaaagcttcctagagtacccagatgcagaattagaagacccaatcttgacaccagggtcaggggatctgtggtttggggggacttgtgctggctatattgttgtcacagcaggaacagtttgtgtcggtatagaggctttaacttctagtaaagggatatataatgaaaatgtaagcaaccatcgtttatttttctcacataataggaatttaagagaaagatatacccaaaattggtttattagctcaacagtttcattcagaatccaatgtctttccatctttgcatttgctatccttagcctttggctttggtctttggaattgtcacgcgatggttataaaatggctgccacactccaggaattgcatcatgacagtgtgaatggaaaataaaggaagagtggcagttcttgtcatgtttcagaagcaacagcatgtctccctaacatctctttggccagaactaggtcaagtagctgcatctacctgcaagggaaactaagaaattgactatcagtgctttttaaacttttttttgtgtgtgtggaaatagataatcactagagaaaaaagggagagtggaatggttgttgatgaggcaaccaacagtgtctaccactctatttataaaccttttcttgatttttcctactaaatgtgtggccgttttttttgcttgctttttgttttttgtttttgagatggagcctcactctctcccccaggctggagtgcagtggcgtgatctcggctcactgcaacctccgcctcccaggttcaagcaattctcctgcctcagcctcctgagtagctgggattacaggtgtgtgccaccacgcccagctaatttttgtatttttaggagacatggggtttcaccatgttgatcatgctggtctcgaactccagacctcgtgatccgcccatctcagcctcccaaagtgctgggattacaggtgtgagtcaccgcacccagccaatgtgtagccttttagttcaaggacctttcattataaatcttcatagtccaaacacccggcatattgtctggcacaaaataggaagaaatatttttggacgtgccaaggaatttgcaagacagtgagacaaatagccagtaaaaatgttagcattaatatattattaaaaatagtgagaaatgctccaggcgcagtggctcatgcctgtaatcccagcactttgggaccccgaggcgggcggatcacttgaggtcaggagttcaagaccagcctgaccaacatggtgaaaccctgtctgtacttccagctacttaagaggctgaggccggagaattgctggaacccaagaggcggaggttgcagtgagccgagatcacgtcactgtgctccagcctgggtgatagggcaagactctgtctcaaaaaaataaaaataaaataaaaagaaaaatagtgagaaatgttatgaagacaaagaataggctactttggaagaataatagtgggaacttcttcatagtctaggaaggcctctctgaaaaggatatatttaagctaaaatctgaaggttaggtcagtcatatgaacagggaggggaatggaataatattttcaagacaatgacctaaaaggaggcaagtatggctaggagctaatgactgagggggtgagtggtacaggacaaggctggagagtttattttatgggtaagcagagaaataatataatctgacgtacctgtgaaagtacacctgagctgatgtacctgcaaaacatcatacaatctgatggacctgctgtataaatgagagattgaatgtggcaagagtagaagcaaagaggccaggtaagaggcatttgcagttgtcttgatgaaagaaaatgactactgggagtaagatggcggcaatggaaatagagagaaatgaacagatttgagatgtattttcgagacaaaatctgtatgacttggtgatggattagatgtcaggcatgagggattgaggatgactcccaagttttttttgtttgatcaacttgttgtactgtttgctgaggtgataaagatggaggaggaagcagatttggaaaagatcaacagttcagttttagacatgttcagtttgaaatgtgtgtgatatgtccaagtgcagaagtcaaattcaattatagctcaaaggagagacccgagctagaagcgtaaatgagaaaaatattgatacaaaatggaatttagagcatccagaatggaaatcacttagcatgtaaagagggaagggaagatggcctaggaccaaaccttgataaacttcaagaaaaagaagtcaagcagaggtaggagaagagaagtcagtcaaaaatcaaaagaatatgacatctcagaattcaaggatgtgaataaatgtgtaagtgatggatggctttcggtctgggctttttgttttttttttccattttaagttccaactttgctacaatccggctacgaatcccacaccctcccaaattatctgaggatgttaattgatacttgatcagaaagcagtgatttttaaaatcatatacttctaaattatctgagatatgaagcaatgagatagggaagtggctgaaatatgtttctctggctcagctgtcatgagggcttgctctagaatggcactcaagcacatgtttatccactgagctctatatcatttattccattagctgaagaaggaatctctcacactctaacttcagttctgttggacatgggaataaaagttagatgtatacagactaaactaaacagatggtagaaaaacaaaggattcttaaagtatattggagaaatgcatttctatggtcaattttcttgaatatcctaagatcaggtttcatgtatataattctttacatttcacaaagcacctttagatgtgtctattccatttaaccctcatcctaactgtgtgaagtagggcacagaagtgtagaaatgattttttaaaactcactaagctaatcaatggataatctgtgattataatagaatctgagtttcggcatctttatcttattccttactgcactatatctggaatggtaaatattgttcatctcacaagcaagctcttattgactgatatcagctgcctagagtggtttattgtaaaagagcataaagcaaattggggaagactacaatacagtgccataggctgattagtaatttctaccattggtattaaatgagaaaataatggtacaagtgctttacatttgtctgccattcctaaactaaggcacctcctgttatttataaggaagaatattctgagaagtttaaaagtctcttgttaaatcatttgatgacgttggataaaatggcttaaaataagaatatgcctgttgcacaaataatctacactcccccaagataatgaataagtcagctggagcatctcaagtttcaatatgtagaggatcaaaatgaaatagtcataaaaccccttgcagacatttcttgggcaggcaaactaatttcctagtaaaagaagttggaagttggacaaattgtatatgggaactttctatactacttttgcaaattttctgtaagtttaacttttcctaataggatgctgagattcagctcttccaatggtctcaaatgttttttggttttgttttgttttgttttttgagacggagtctcactctgtcacccaggctggagtgcagtggcgtgatcttggctcactgcaacctccacctcacgggttcaagcaattctcctgcctcagcctcccaagcagctgggattacaagtgcctgccaccatgcctggctaatttttgtatttttagtagagacgggattttgccatgttggtcaggctggtctcaaactcctgacctcaggtgatccgcccaccttggcctcctaaagtgctgggattacaggcatgagccaccgctcctggcctcatttaaccattttgactttcactttttctgtcttcaaaatgaggtattgagctaggtaaacttaatgtcttttttcgctttaattatctaataattctgtgattctcaacttggtgtgttaaaccagattacacctaagaaaccctgaagactttttagctaggagtttaaatattcacttagtcattcaattaatatctattgtgggtctgttatatgccaggcgccattttaggtattgataataaagcagcaaacaagacaaaacccctgccctcaggagagcttacattcttgtaaagaagacagatgataggccgggcgtggtggctcactcctgtaatctcagcactttgggaggccaaggcgggtggatcacgaggtcaggagatcgagaccgtcctggctaacatggtgaaactccgtctctactaaaaatacaaaaaaaaaattagccgggcttggtggtgggcacctgtagtcccagctactcgggaggctgaggcaggagaatggcatgaacctgggagctggagattgcagtgagccgagatcgtgccactgcactccagcctgggtgactgagcaagattccatctcaaaaaaaaaaaaaaccgaaaaacaaagaagaaagatgataaacaagtacacaattatcatataacaattttaaatagtgacagcatgttgaaataaataaagcaaggaagacgctagagagttgttcatggaaggaattgtcattttatataaggtgatcagggaaggttccactgaggaggtgacatttgaggaaagacctgaaagaagtggggagggagacccgaaagttcatgaggaattgtgtcccaaacagggcaacacataaaaagtccttgaggcaagactaagctgattatataacatttaaaagaattaggccaggtgtggtggctcacacctgtaatcccagcacttttggaggccaaggcgggtggatcacctgaggtcaggagttcaagaccagcctggccaacatggcaaaaccgcgtctctactaaaaatacaaaacttagccaggcatagtggtgcatgcccatagtcccggctacttgggaggctgaggcaggagagtcacatgaacccaggaggcagaggatgcagtgagccaagattgcaccactgtactccagcctgggtgacagagcgagactctgtctcaaacaaaaaaaaaaagaattaatttacatatcatgagatcatctagtctaacacccttactagacaagttcaaaaaggttaagacttggccaagatgacacagctatttaatgtgatatctgggttagaattcacctcatctgaattcctctcaaattgtgctctttgaggtcaatgtgccttttaaaaaatgacagaaagcatggctgtagatttcagatcataccaaatttgatggaacaatgaccatttttagcttcctatagagtctaagacttgaacttgccaagggagtcacagctggatttgtaagcatcaaatccacaaatgtacttaatgtcaaccaaggattttgtgtcacctgtaatgctcccccaggaagcccccaagtccactagtcctaatcactgtgtttggcttcataacctgttggcccaaacattacgcaaaaaagagcaatattcccaaggtggtcatgttagttgtggtgagatgtcaaccataagtagatctgaccgaggaaatgccttaaggaagcagctcaggaacacctgagtatatgtgtctagaatgaagcctattaaaaaaactactgcagagctaaagacagctgaaagccattatgacagtcacaactacttgatagattgaaaccaaagagttcctttgtgattagatagatcaggactctaaatcatgtttttacttcatgtgttcattcattcatcatacagtcagtgattcagtaaacaatattgagcatccattatgtgccaagcactgtgttaaattctggaaacacagagatggattagacccctgtccccagggagcataaagactagcagagttagacctccctcccatatgaagaaattaaatgaggtaaggcattaaaagtgctatgattacataatacagaacccaaaggggaaggcattttctgaaaaacagaaaactgaaaataccagcttttcagcctcacacagacataggaaaaccaacccccatcaacatcatctcttcttttttttttattattactatagtttaagttctagggtacatgtgcacaacgtgcaggtttgttacatatgtatacatgtgccatgttggtgtgctgcacccattaactcgtcatttacattaggtatatctcctaatgctatccctcctccctcccctcaccccaaaacagtccctggtgtgtgatgttctccttcctgtgtccatgtgttctcattgttcaattcccacttatgagtgagaacatgcaatgtttggttttctgtccttgtgatagtttgctgagaatgatggtttccagcttcatccatgtccctacaaaggatatgaattcatccttttttatggctgcatagtattccatggtgtatatgtgccacattttcttaatccagtctatcattgatggacatttgggttggttccaaatctttgctattgtgaacagtgccgcaataaacatacgtgtgcatgtgtcttcatagcagcatgatttataatcctttgggtatatacccagtaatgggatggctgggtcaaatggtatttctagttctagatccttgaggaattgccacactgtcttccacaatggttgaactagtttacagtcccaccaacagtgtaaaagtgctatttctccacatcctctctggcatctgttgtttcctgacttttgaatgatagccattctaactggtgtgagatggtacctcattgtggttttgatttgcatttctctgaacatcatctcttaatataaaaagcataatgtgctgatttcacattgcatgcctgtatcaaaacatctcatatgctctataaatatatacgcttaatgtgtacctacaaaaattataagaattttttttaaagcaacaataaatatcttcattagtcaaccaaattaaatctattaatatatccatgtttgtgaacaggatggccacagaaccctgtggatgcttaccacttaaacatttcctgaaacaaatatgtttccaaaacatcttgcctgtctaatctgacaactgcagacatcctaactaggctctgaaggtgctctccatagcactgatgttattgattcagttgttaacagcgcaggcataaatgactgatgataactctctaaacgtcccttcctactgccgttgaaatggctctgggctttatccaagcagggctgctaaatgaatagtagatgtaccagcagaggagaaattggtcctgaggtgaattaactctcctgaggtagatttgtttgtgcttccaacaacctgtacgttaaaccttgtgaaccttcatgtaggaattttgaggagaaatgggcaatttttggaaagcctaatgttttatcagccgctttttcttctcattgagacctgtgtattctcaagggactttggaagtttgccattttaagaacagacttgatgagaattatttgaagtcctccacgtttccatttatcagttttcctaatacagacatcctacgcacatcgttgaaagaatgttctttttgcctcacaggtagatcacaaaagtgggcccataatcattgggtagagggtttctcagctctgagttaaattgcagctgggtattgtttttctgtaataggatcttctctgagtgaatggtgaaacatgcccatttttgaggtcatgagagcagagctttccacatcatggacagaaaagggcaaccggccatggtttcagttatacagggagaggaaacaataggttttgtctctgctttgctattgcttcaacagcagcatactgttggacactcagacattagggcacaatttagacttgtttcacagctgtcatttctttcctcaaaaacaacaaacctgcatgggggaaatgagtctacatttcagggtttttcaagaattgataacataacatgtacttcaccatgaatttatattccacaggtccctgttctcttctctggtcatcagagtacaaaatcacaaccaaaaagcaagaattgatatctatgaagctaaagtagtagtagtagtagtagtagtagtagtagtagtagtagtagtagtagtagtgaagcaggatattaccctgatcccctcgcgggcgggaactggactgcatagccgcttcggtgctggcaggggcagactccactggctcagtctcactgagttccacccctcatgggagaggaagcacaggtgagtgggtacaggagccagggtgagtgcttttgggcgccagcaggaacaaaactctgtgtgggccccatggcagtgtctaggagggtgcccgcgacccttgaatccccagaaggagtgttacagggcccttttatctttgccatctgcagatggcttaagtgttaacagctcagtggagggtcagtgtgacagccttctgtactcgcacttgtggcacctcagatcttgcccattttccaggaggaatgaggtcacacaaactaattggagatggtaaatgcgggggattttattgctgatgaaagtggctctcagcaggaaaaggagctgaaaaggggacagagcaggaaggtaatcttcacctcgagtccagctgtccgcaatcagactcctctctgaagctatgctgccaggctgtccctcggaagtcaagccacttctctccaatgcacaaccatagtttccaacatccagctgcttctcctctgtgccggctgagcctgggatttttacaggcacaggatggagggcagggtgggctatgggtggttttggaaaaggcaacatttgagcaggaaaacagggatgtaagttctcactttgggccacagttccaggcttttaggcttaagggtggggcccttgccagagacccgccctcttctgtccagaatttccctgcctcctgtccctatcagtagtaatagtagtagtagtagcagcagcaacagaagtaatactaactactacataccaagcattatctacgtacttcatatctattcaccaacctaattgttacaactttcactcgcgtccgtgtgaagagaccaccaaacagtctttgtgtgagcaataaagctttgtaatcacctgggcgcaggcgagctgagtccgaaaagagtcagcgaagggagataggggtagggccgttctataagatttgggtaggttaaggaaaattacagtcaaaggggggttgtcctctggtgggcaggagtggggatcacaaggtgctcagtgggggagcttttgagccaggaagagccaggagaaggaatttcacaaggtaatgtcatcagttaaggcaaggaccggccattttcacttcttttgtggtggaatgtcatcagttaaggcaggaacaggccatttaaatttcacttcttttgtgatttttcagttacttcaggccatctggatgtatatgtgtaggtcacaggggatatgatggcttagcttgggctcagaggcctgacattcctgtcttcttatattaataagaaaaataaaacaaaatagtgttgaagtgttggggcggcgaaaattttcggggtggtgtggagagataatgggtgatgtttctcagggctgcttcgaggtggatcaggggtggcgtgggaacctagagtgggagggattaagctgaaggaagattttgtggtaaggggtgatattgtggggttgttagaagaaacatttgtcatgtagaattattggtgatggcctggatacggttttgtatgaattgaaaaactaaacggaataagagaaggagaaaaacaggtattaaaggacgaagaattgggaggacctaggacgtctaattagagagtgcctaaggaggttcagcatagccttgccagcaaagattatttactttaagagttaagagtggtggtttggggatagcaccaagagatatcagctgtgatggcttggagaaacagtgtaaaccagcagtgtaaacaagagcagggcatttatgactagttgagactggtgaataggagtatgactagacagaagataggagggatgacaagttttttggggtgcagtctaagttggtctggtgtctggaatgagactggggcctaataaaaaggagcgtccatacaggagcttaaatgggctgtaccttgtagcattctgaggacaggcctgaattctgagaagggcaagtggtaaaagtattgtccagtcctttttaagttggtggctgagcttggtgaggtgtgtttttaaaagaccattagttcactgaatactaagagcctgagaaactgcttgggtgatttgactaataaagtccagtctgttataggaccgtatagaggtgggaaggccaaaccgaggaattatgtttccctgtgggaaaggcctctacctatccagtgaaagtgtctacctagaccaagaggtattttagtttcttgactcggggcatgtttagtaaagccaatttgccagtcctgggcgggggcaaatcctcgaacttgatgtgtggggaagggagggggcctgaataatccctgaggagtagtagaatagcagatggaacactgagaagttatttctttgaggatagatttccacgatggaaaggaaatgagaagttctaagaggcaggctagtggcttgtactatagcatagcctgcctttgctggtgtgtggccattaggcctggtggaactgccatcaataaaccaagtgtgatcagggtgaggaacaggaaagaaggaaatatggggaaatggggttgaatgtctggtggatcagagatacagtcatgggggtcaggcgtggtatcaggaataatgtgggaggccggattgaagtctgggccaggaacaatggtaattgtgggagactcaacaaagagtgagtacagctgaaggagccggggagcagaaagcatatgcgtcaggtgtgaggaagaaaatagattttggaagttatgagaactgtagagagtgagttgagcatagtttgtgattttgagggcctctaaaagtattagggtggtggcggctgccgcacgcagacatgagggctaggcaaaacagtaaggtcaagttgtttggataaaaaggctacaggacgtgatcccagtccttatgtaagaatcctgactgcacagccctgcacttcagcggtgtgtaatgaaaagggttgggatgagtcagggagagctcgggtgggagcagtctctaaagctgtcttcaaggaatggaaagaggagtggggaaaggatttaggatctatggggtcagctaggtttccttttgtgagtttatataatggttttgttaggatggcaaaaccaggtatctaaagtcgaaagtatctaaccatgcctaggaggaaaaaacttgttgttttctagaagggattggggtttgggagattagtcagacatgatcagcagggagagcacgtgtgtttttatgagaattatgccgagataggtaacaggtgaggaagaaatttgggcttgactgaagtaatgggggctgtctgtgaagccttgaggcagtacagcccaggtaatttgctgagcctgatgggtgtcagggtcagtccaagtgaaagtgaagagaggctggggtgaagggtgcaaaggaatagtgaagaaagcatgtttgagatccagaacagaataatgggttgtggagggaggtattgaggacaggagagtatatgggtttggcaccacagggttgataggcaaaacaatttggttgataaggtgcagatcctgaactaacctgtaaaccttgtctgcttttaggacaggtaaaatgggggaattgtaaggggagtttataggctttaaaaggccatgctgtagcaggcgagtgataacagactgtaatccttttaaagcgtgctgtgggatgggatgttggcattgagcggagtaagggtgattaggttttaatgggatggtaaggggtgcatgattggtcgctaaggagggagtagaggtgtcttatgcttgtgggttaaggtggggagatacaaggggagatgtgaaggaggctttgaactgggggaaaaggcggcaatgaggtgtggctctagcctaggaatagtcagggaagcagatcatttagttaaagtgtctcggcctaatagggaactgggcaggtggggataactaaaaaggagtgcttaaaagagtatcgtctaagttggcaccagagtttgggagttttaagaggtttagaagcctggccgtcaatacctacaacagttatggaggtaagggaaacaggcccttgaaaagaaggtaatgtggagtgggtagcctccgtattgattaagaaggggacggacttaccctccactgtgagagttacctgaagatcggcatctgtgatggtctagggggcttctgaggcaatcgggcagcgtcagtcttcagccactaaaccgagaagatctgggaaggagtcagagagccttgggccagagttccaggggctctgggagtggctgccaggtgagttgaacagtccgattttcagtggggtcctccacagatgggacatggcttaggaggaatcccgggctgcgggcattccttggcccagtggccagatttctggcacttgtagcaagctcctgggggaggccattctggaggaacccctcgcagctgcagttcaggcatttggagttcttctgtgctggagatatggctggggtttgtctcacagtggagggaaggaattgcaactcagaaatacattgctacttggctgcctctactttattattgtacaccttgaaggcgaggttaattaagtcttgtggggtttgagggctggaatttaatttttggagtttaatgtcgggagcagattgggtaataaaatatatattgagaataagacggccttttgaccttttagggtctagggctgtaaagcatctcagggttgttgccaaacgagccatgaactgggcttgtttttttatttgatgaaaaagagcctaaacgctatctgatttgggataaagaaaaaggagcattaaccttgactatgcctttagctccagccacctttttaagaggaaattgctgggcaggtgggggagggctagtcatggaaggaaactgtaagccggaccgggtgtgaggagcggaggtgataaaaggattatagggtggaggagcagaggctgaggaataattgggcctggcgaggaggggagaggtcagatgggtctgtagaaaaggaagattagaaagactgagcgatgcttggggttgggactgaggggacaggtgggagggaaagaaggaagatttggaaggagttgcattgggaacagagactggggaggggcagatgtgtaaaagaatgcctggacatcaggcacctcagaccgtttgcctattttatgacaagaattatttagagcttgtaggatggaaaaattgaaagtgccgttttctggctatttggaactactgtcaagtttgtactggggtcaagtggcatcgcagaagaaaataaggcatttaggttttaggtcaggtgtgagttgaagaggttttaagttcttgagagcacaggctaagggagaaaaaggaggaatggagggtggaaggttgcccatagtgaaggaggcaagcccagagaaaagggagtagagacacggagagaaggggtggggggttcttgtcccccagaaaagcggagaaggggtagagacatggagagaagggttggggggttcttgcccccgagaaaagcggtacttgccgctaaaggtgaaggaccaaggcaggcgtccccgtgtggtcagacacctctgaaatgtgggtgaataatcaggcaggcatccccgcgtgattaaataccaagggaagactcttccgagtccgtgaccggtgccggagttttgggtccacggataaaacgcatctcctgtctctaccagaaaaggaaaggaactgaagttaagagaagggagagattgaagtggggcgccaagattgaaaggagaaagaggttgagggatagtgagaggttggaggagagagtaaaaagaggccgcttacctgatttaaaattggtgtgatgttccttgggctggttagtctgaggaccagaggtcgtaggtggatctttctcacagagcaaggagcaggaggacaggggatagatctcccaagggaggtcccctgatccgagtgatggcaccaaatttcatgcgcgtccgtgtgaagagaccaccaaacaggctttgtgtgagcaataaaactttttaatcacctggatgcaggcgggctgagtccaaaaagagtcagcaaagggagacaggggtggggccgttttataagatttgggtaggtaaaggaaaattacagtcaaatggggggtggttttctggcgggcaggagtgggagtcacaaggtgctcagtggggaagctttttgagccaggatgagccagggaaaggaatttcacaaggtaatgtcatcagttaaggcaaggaccggccattttcacttcttttgtggtggaatgtcatcagttaaggcaggaacaggccattttcacttcttttgtgatttttcagttacttcaggccttctggatgtatacgtgcaggtcacaggggatatgatggcttagcttgggctcagaggcctgacaacaacgatcttgtagataggtactgttgtaattcccagtttacaaataagaagactaaggtatagagagattgagtaatttgcccaaagcccacagctagtaagaagccaagattcaaacccaggtaatatggctgcagacctggtaatcctaaccattacattaggctgactctcgatagttaacttatttaagctagtgttaatcacatcttaacaagtttgagtaataaaatcttaggttgaaaggggccttcaagatctagtctaaatcctttcaggagttcttccacatttctgctagaaaacactttggcctaggcttaaaacttagtgatggggaactcctcactttgtaaagcagcctgttcagttcacaaacaccctaataattaggctgttatctcttgcattgagctgaagttgatcttcccataacctctgcctttctgtctatatgtatgctttggaaatatacacagtaagtgtaaaccctcttggcaaagacagcccttcaaatacttgggaggcattcaattccccccgccacctcccgctctactctcactaccaagtctttagaatagagtacaggtatcaaaatcaaaacaaacagggagtagaaacttagtgccagactttaagtattttttacttataaaatctttttgtgtaacgagtagagcaactcctaactgcatatatgtactaagtttgcaaatggggcaatttgtttttccccatgcactggcatcagaggtggtaaatgctggcctgtcagattcaatgcattttgctgggttagaaccgcaagggctttccaggggaccaagctctctctgctgtaatcattaaaacctgcagaatcctgtgtgactctggggagaagcccagtgctcttggccctcatccaccctcactaggaaagctgcttaaaactaggacagaagaaacaaccactggcttaggatcagtcctcagacctgccttggcactaccccttttattccaaattttgcagtggcacctccaacttcttggtcacgttttgtaccttgtctgtttcctcatataacttcattccaaattccaacccatgctctgacatttcctctccattcttgctagacaggaatttctggatattggatattggcccctgcccataccctgactctgtatattcttttgtcctgctgaccagtttgagcttctgaataacaaaaactccccaaccactttaaagtcctctactttagcttgatgggtccctctcctgtattttctgaccttgactctgctctctgtacaaatagtaattacactcacccccaagcagagaatctgtgtcaaaatccatcaggatatctaagcacatcattatatctgtcaacttccccagactcctgatctcaatcccttattttcaacaacctggcaccgacagagtataatttcttttgtatcatgatgcagtttgatgtgcttttcgaaaggttatggtggtgattttaaagagatctgttttgttagaggaaggaaggaaaatagtgctgtttgcttccatgcagttcctcagagcctatgccagggtgatttcagctcatgagagaatctaaagtctaaagagatgtgtggagattagaaacattggtgtaaaaaatcagattacggagacgtaatatccagggtgtcagaggaggcagggagcttcaatcatgtttgaaactataggtcccacccaacaggatgagaaaatacaggagaagccagaaaaggtacctgcttgtgggtaaaatcaattaaatggaatcaatggtatggtagccatcatttctttcttttcaaattgtggtaaaaacacataatgtaaaatttaccattttaaccattttttagagtatagttcagtaatgttaagtatattcatgttgtcatgtagtggacttgcagaactttttcaccttgcaaatctgaaactgtacccattaaaccacttctcatttcctcctttcccccagcccctggcagccatctttctactttccgtctctatgcatttgactattctaggaacatcatgtaagcggaattatacagtatttgttcctttttggactggcttatttcacgtagcataatgtcctcaagtatcacctattagctgtcattgcttgaacacggttttctgccaagcacatgatctcgttttattcccagcacaactctcaataacaactgtgtaccttttttccctttcacagattaggaataaaaggctctccaagactaggctcagaagcagaagcagttggagagttgcttgcagaaggattattgtcatactgggaagtgctctcaggatttacacctctaagaaactgaaaggggcatgactgcgcagaggaaaagctggttcaccatgcagttgcaattatggctgcagcaggagcatgcagggaagctctggagtaggtttggcctttcagagttgtccccagtaaatcaaatgggtgaagactttaacccatttatgctggaggttgcaaaaatgttttgtgaaaagtcagaccttggcgatgaccttgagcagtaggatataaaaaactcccacaagcttagcgtcccaataatggaacactaggcataaatgagttaatccctgcatcagccagtcattggccctaggtctctccctgagggaggggatgtagctgtgtgaggcagttccctgagggcacattccaatgaaggccccagctgtgagccagcagccaataaggcagcaggtggcccatgcatgcaaaggccctaaagaggaggtccagggtggagcgccacggtgtctactacagatgctgaaagagtaaatacattttatttatttatttatttattttattatactttaagttttagggtacatgtgcacaatgtgcaggttagttacatgtgtatacatgtgccatgctggtgtgctgcacccattaactcgtcatttagcattaggtatatctcctaatgctatccctcccccctccccccaccccacaacagtccccagagtgtgatgttccccttcctgtgtccatgtgttctcattgttcaattcccacctatgagtgagaacatgcggtgtttggtcttttgtccatgtgatagtttactgagaatgatgatttccaatttcatccatgtccctacaaaggacatgaactcatcattttttatggctgcatagtattccatggtgcgtatgtgccacattttcttaatccagcctatcattgttggacatttgggttggttccaagtctttgctgttgtgaatagtgccacaataaacgtacgtgtgcatgtgtctttatagcagcatgatttatagtcctttgggtatatacccagtaatgggatggctgggtcaaatggtatttctagttctagatccctgaggaatcgccacactgacttccacaatggttgaactagtttacagtcccaccaacagtgtaaaagtgttcctatttctccacatcctctccagcacctgttgtttcctgactttttaatgaccgccattctaactggtgtgagatggtatctcattgtggttttgatttgcatttctctgatggccagtgatggtgagcattttttcatgtgtcttttggctgcataaatgtcttcttttgagaagtgtctgttcatgtccttcgcccactttttgatggggttgtttgtttttttcttgtacatttgtttgagttcattgtagattctggatattagccctttgtcagatgagcaggttgcgaaaatttttctcccattttgtaggttgcctgttcactctgatggtagtttcttttgctgtgcagaagctctttagtttaattagatcccatttgtcaattttggcttttgttgccattgcttttggtgttgtagacatgaagtccttgcccatgcctatgtcctgaatggtaatgcctaggttttcttctagagtttttgtggttttaggtctaacatttaagtctttaatccatcttgaattaattttcgtataaggtgtaaggaagggatccagtttcagctttctacatatggctagccagttttcccagcaccatttattaaatagggaatcctttccccattgcttgtttttctcaggtttgtcaaagatcagatggttgtagatatgcggcattatttctgagggctctgttctgttccattgatctatgtctctgttttggtaccagtaccatgctgttttgcttcctgtagccttgtagtatagtttgaagtcaggtagcgtgatgcctccagctttgttcttttggcttaggattgacttggcgatgcgggctcttttttggttccatatgaactttaaagtagttttttccaattctgtgaagaaagtcattggtagcttgatggggatggcattgaatctataaatttccttgggcagtatggccattttcacgatattgattcttcctacccatgagcatggaatgttcttccatttctttgtatcctcttttatttccttgagcagtggtttgtagttctccttgaagaggtccttcacatcccttgtaagttggattcctaggtattttattctctttgaagcaattgtgaatgggagttcactcatgatttggctctctgtctgttattggtgtataagaatgcttgtgatttttgcacattgcttttgtatcctgagactttgctgaagttgcttatcagcttaaggagatttggggttgagacgatggggttttctagatatacaatcatgtcatctgcaaacagggacaatttgacttcctcttttcctaattgaataccctttatttccttctcctgcctgattgccctggccagaacttccaacactatgttgaataggagtggtaagagagggcatccctgtcttgtgccagttttcagagggaatgcttccagtttttgcccattcagtatgatattggctgtgggtttgtcatagatagctcttattattttgagatatgtcccatcaatacctaatttattgagagtttttagcatgaagggttgttgaattttgtcaaaggccttttgtaaatacattttttaaggtcacacaaatgacatatgggacagaacagtgtttaacttcaaaactcatgttctttctgctatactgggccttctctccgaaagaggcctaatttgcacactacagtcaagcttagaatctattcatagttaaaatgtggagtcaaagcccaggaactatgtccttcaattcatctttcattacttacctattccttatcattcccgctgacaccaaccattttttctgacccttgtcatgaggagtgaagttgtatcattgcagcagctttctacttgtactctatgcctaaaatctctccttcctccatctggtcagccaattgctgtcaagttaatcttgcaagaacactacttttgccagtttaatttcgcaaaactcctgctgtgtgccaggagtgtcccagacatcaggtagtctaagataagcgatagtctctgcccctaagccgtttgcaacctttggagagacaacgtcattatcaccaccagcacccccattaagctcagagctaatatatgccagatgagactctgccagtcactgtgctaaggacttgacatacgttatctcccttaattctaacaactactttctgaggtacctctgatgagtagtatcatttttagatacaaaagcagaaacttagcgagttaagtgctttgcccagtggctctcagttgagaaacgaggtagtcacaccaggcagtccaacttcagtacctgagttcttaatcatcatgtttacaactttggctcaacattgtcaccaagatcgggttcaaatacatccattatcaatattctttctgtctccttgtatgtccaaacaaacaaaacaaatgcttccctcctgatgaggaaagtctccaaatcttgatacctgctgtgtctggacagtttttcctgctatttgctgagtgctggaaggattccctcaatccagatgtgattgcagatccagctcaagctcagcgtcctccagggaacctttgaactaaccacccagaaacgagcctttcaccggacactactcattttcacatatctagatcttatttccccatctgaactgtaagtgtcttaagagctgattttgttgttttttaataaaaaataattcttagttttttttcttattaccaaaaaattattcgccattgaagccttctgaatttttaataagaaaactattggtatattgcttcaaaaagaaatctaagcttctagattcttgaaaagggatagtgacagaaccttagaattaatattcaatataactaatctgatgaaaattcagtcattgatacattactgagaactactagatctcagcatttttaattgtagattcacatggagttgtaagaaattatacacggactccacatacctttttaccgagtttcctctaatggtacacctgcaaaactctagttcaatgtcacaaccaggattttgacgtcaatattgtcagtatacagaacattttcatcactacaaagatccctcctattggccttttatagccacacccacttccctgccccccctacctcctacttccagcaactactagtctgttttccatttctttaattttgttatttcaataatgttatatgaatggaaccatacagtatgtaatattttgggatggacttgactcactcaacataattccctagagatttctctttttatatgcagcaagacttgtttcctttttatcgtgagttgtatgctatggtttggatataccctagtttatttaatcactcaccccttgaagacatctgagttatctgtagttttggactattgtgaataaagctaccaacattaatgtacaggtttttgtgtgaacataagtttttatttccctgagataaatgctgaagagtgcaattgttaggtcatatggtagttgaatgtttagttttaaaactgccaaacttttccgaagcgtctgtactattttatattccaccagcaatgtatgagtgatccagtttctctgcatcttcaccaacatttggtgttgtcattattttttatttttagccattctgatatgtgtgtaggaatatctcattgtgcttttaatttacgtttccctcgtggcaaatgctgttgaacaacttttcctgtacttgtttgccatatgtatatcctcctcattgaaatgtctgttcatgtcttttgtctattttctaattcaaaagtttttttatagttcggttttgagagttctttctgtatcagatactagtcctttcttgtgtatagggttttcaaatgttttctctctcatcttttcatcttcttaacaggggatgaaaaagaattttaattttggcgaggttgaatttatcgctttttccttttatggatcatgcttttgtgttgagtctaagaatactttgcctagccctggatcccaaagattttctcctgttcttttttttttttttttttgagacggagcctcgctctgtcgcccagcttggagtgcagtggcccgatcttggctcactgcaagttccgcctcccgggttcacgccattctcctgcctcagcctcccgagtagctgggactacaggcctccaccaccacacccagctaattttttgtatttttagtagagacggggtttcaccattttggctctcctgttttatatgtcttatagttttacattttatgtttaagtctgtgatccatttgatttttatataaagtatgaggtttaagttgaggtttattttttgcatatggatgttcaattgctctagcataattatttgaaatggctggcttgattattgaagtaaggtcagacttatttctctcctgggcttcagacccagccaccttctatgtttcttgtccaccacaacctgaatgtcccacagacacctcagacttaacatgtccccagcagctcattattatcctccttttgtcccaatccaccctcaacatttttccctccctaattgtgctgttcttatgaacgctacgcttcacccaattgcccaagtcaaaaattagggtattatttctgaatctacttttatctttaaatctaacatgatgcattgccaaattctgtcagctctatccccaagccatctcttaattcattcccttatttacacctcccttgactccaatatcttttgactcaaatgctacatagcctctaatttatctccctgatattgttcttgcttccgaatcccttttccacaatgcgcctatagtaatcctcctaaaatgcagatctgattaggtgactctccttattttaaagtctttcttattgttttctcctgccctaaggcagaagttccaacaaatcttgttatcagattctggattaaatcccggcctcagcagtgggacctaagatagtgcctgaatttccatgaacatttattgatgacaaagagggtcttaaataatgagtgatgtagactttccactgtcaacatcacagattctggtttttaatggtattcacatttgccttctccaagagtccaggtttaatgatggtgagacctatcctaagacctggctttgtagtgaggggttacctcatcacagaatcaagaagggacctcgggccgggcatggtggctcatgcctgtaataccagtactttgggaggttgaggtgggcagatcacctgaggtcaggagttccagaccagcctggccaacatggtgaaaccctgtctctactaaaaatacaaaaattagctgggcttggtggcacacacctgtaatcccagctacttgggaggctgagacaggagaatctcttgaacccgggaggcagaggctgcactgagccgagattgcaccactgcactccagcctgggcgacagagcaagactctgtctcaaaaaaaaaagggcggggggacctgggtgcaagtaattctaagaagcaggaataagagaacaagaagaatgaagcgacaaagaaagatgagcaattctctggaactgttgagaagtgtacagaagaaaacaaatctggatataggtagctacagcctgaaatatggaaagccagagcatgtgtatacctgctcctgctcccactggttgagaattgattcctttttcatctgatatgggcaagcattggatctgagtgggacacatcctctccagtgcacccctgccttttccgctgctctgaacttcacacaacgtcggaaagattcaaaacaatgtagaaaatctaagtataaatacaaaaaggaaacaagaagtttttctatcaaagctgtgaactatatgatatgagtaagctcaataaacactgtgcagaagttgggaggggaaaaagagaattgctgccaaagcactaacccctgtggctggctatgcttgcccacccaggaagctcccatgtcatgggggtcaggggaacctagaacagaaagctgaaaggctcagggatcccttttgagaagggatgctggctatacagcacgagttagaacttgcacagaaccgtccactactgctgacactggaatcacaggtgggctgacaagatgtgatgcaagcaccagacatatttgctacaaacctcaaagtggagcagagcagcggcagtgtcagtcttcttggtgtcaatagaatacctgtttatttgttgaattctccctatatgaataataataatacaagaattcaaagcaggataggctttgtgtcattggaggagtatggagaaccatcagtgcagtaagtgtcgtgggaggtttctagacagtttttaaaagtcgatattgagtcaaccatcaaatgtgaacaattctgatatgccagagcatttgtattcttaactcatggggttattacaaagatcaaatgaaataatcattataaagcactttgtgcagtgcctggcacaaagcacgcactcaatacatgttaatgtttatacaattattattattgattgtcagaattatcagccccacatcagcaaagaatagtaggtggtctgtcagcaggaacatggaaacattctcattacatagaagtcagtgttgcagggacagtcattaaaacaggatctaattttagtcttctgagggaaaatgctaggttctccggaaatgttgaatccttcctcgagcatgtagtttaatttttcaaaattatattgcatatcctgtaaaatgaaaatgaaattgtactgctgttcattaaaggcccccaaaaatcttaggcactatacaatataaatgaaaaaaaaggcgttatttttccatagggcataattagaaataaagaagcaaggtcactcacaaatttccgagctataaaggaggaaaggaacaagattttcccccggttattttatagctgccaggttgaactcatacttatccaatgagccccagaatggaataccgttctacaccaactgtactgatgatagtgattcagggagtaaatgataagattccatccttctaaagtgcttttgggattggattctagtaagtttcattttgctattggccaatcacaaaagagactacaatagagaaaagtgaagacatcatgctgaagacagactgctgcatagaaaaggaagagggaccccctaatttagagatatggatggagaaaaaaaggcacttatgctgtagcataagggaaacattaaataaagctataatagaggagaaaatgtctttgaatagaagaaaaaaatcagacagacagaaatagactaaaatgctaaaaaaaaagatacaaaaggacattgaaggggacatacagtgattattacacaaattaaatgcacacagttaaaagggaggtgaaaagcttctaaaaagaatgagtgtgtagtgaacttaattttatcatctttactaagacaaagttaaagtccctaaaatattttaagacacttaaaaaaaaaagtcttaaaattttgagagcctttcagctctgtcaactctagactttccctcctacttaagttttttttcttttttttcttttatcttttttatttatttatttttttttttatgttttttttttttttttttttttttttgagagagagagagagtggatcagccttaataagagaatggtcttctgccaggtggtattctcctaatccctttccagtgagatccacaagggttcaaaaccactttctggggtcttagaggcaccacttatctctcttcctctgctcatatctttctgctccagtgcccgcatagtttgtgttatcagtggtgcgtagcctgagacatccacgacctatgccagctctcgaagtaatgtgattggcatccaaagaaacacaagaagcccatgatttcgtccctttgcaatttaaaatcatatttaaaatgccttttggtcatacaaatttgaaaatgatcttgtaaatcacttccgggaatctatggtcaaaactcagcttagagttctctacttcttaacagagtgcctgccggtaactagtgactgtcaatgagtttgaaaacataaattgatgtgcaaatgctagataatagcaacatcctgtgcaactgggcagcatttctgttgtttggcttttttattttcgtggactctcccaatctgagagaaaatagatttgagttcctttttaatcggtttagacccagacaaggatttaattggtttagaccccattcacctacgtgtgtcactctgtctccaacataacagaggagatgaccaagacaacatgctctccagccaggaggtggggaatactttggtgtcatagcagacaattattgatggaaaactcatgttagaaaatgtaaggtaccttcttctagacggagtaaaaggggcagctgcccagactttcattttaaatagggagcccatgatacaaatcttttaatacaattttaaaaagaagagacatagggggtatctcttaggacctgtcaacaaccaaccctctatcaaatggccaaatcacaggtggtctgcagcttagccaaaatgtccaagtacctttttgtaacacagaatctcctttgaagatccagctttcattaatgatccccagcagctctggtcaatgtgtcttttcacaaatgaagctttttaaaagctttcagtggacaaatgtggctttgagttttcaactaaatctttctgtttaaaaggagtgctgaaatgggcatactttataatcttaaatgctgcacacaaaatactgaaatattattgaccctgagaggttggttcaaatcaaatagcatactcacgtaaacgttctcttttcctaatattagcaacagggaatgtgaaatagagaggggcgggatatgctggataggggtgcaccaaaattttcaaaaagcctcgaaactagtgtatattgataaccttgtggcatctaatatctagtattctttttttttttttttttttgagatggggtctcgctctgtcgcccaggctggagtgcagtggtgtgatctcggctcactgcaacctccacctcccgggttcaagtgattctcctgcctcagcctcctgagtagctgggattacaggcgcccgccaccacgcctggctaattttttgtatttttagtacagacggggtttcaccgttagccaggatggcctcgatctcctaatctcgtgatctgcccgcctcggcctcccaaagtgctgggattacatgcgtgagccaccgcacccagcctagtattctatgtctattatttcttcataatgagactgggggaaatctttggagaattaatgccgcagttggtaaaatcattctataataatgggtaccattctgctctgtcccacatttttatgaagtctctttaaatttaaaaaggcaatgtgctttgtggttcttgagcaacttaaatacgttgctctgaatagttattgtgatgaggtaatttgtaacaacttttaggatcaatgctaattttcttaaatgtttctgtagtttcccctttattataaagtatattaggctggactcttggctgtaagtgacagaaaactcaactcagattagttaagaaacaaaagggtgttggtgacagtggtggctttcagactattgctgcaggcccacctgccatcctcttaacaccctcaacataccctgcagaaaagagagagctactctgacccgagagcttaaagactggtcaagtatgggcttgactctttatggcccaaattgggtcacatgcccacctaggctaggggaatggaatcgtggaattgattgattgattattgttgcaggttgagtcctccaagaagcagatgccagggcagatttattgcagaataacacctgtgaagaaataggggtggaagcagaattgaacaagggaagccatcagatcacaatgcagatcttctagactctgtgtcagcacaacaaggaatgccagagcaaagactgccaattagaggaatactgaattgggcagatctgacaatagtctgtatataactcgggactgttaacttctccttcctcaaccagttatagacatagaataggactctcttatctcaaacatcaatatctgtgtatatgaagtagagggtgaaagtttactgtacactagtggttctcaaccaagagcaagtctgtcccccaggggacatggcaatttctggagacattttcagttgtcccaactggtgaggaggtgctactggcatctagtgggtagaagttgtggatgctgctaggcattctctataattcgtgggatagatagcacaacaaaaaattgcccaggccaaaatgtcaataatgctgaagttgagaaaccttgctctataaagatacatgtcttggccgggcacggtggctcacgcctgtaatcccagtactttgggaggccgaggtgggcggatcacgagatcaggagatcaagaccatcctgggcaacatggtgaaactcatctctactaaaaatacaaaaattagccaggcgtggtggtgcatgcctgtagtcccagctactggggaggccgaggcaggagaatcgcttgaacccgggaagcggaagttgcagtgagccgagatggcgccactgcactccagcctggtgacagagcaagactctgtctcaaaaaaaaaaaaaaaaaaaaaaaaaaagatacatgtcttatgtgtactgaaagaggccacggaaaccttttgttgatacattcttgatagtttttgttcttatatgtagttatgaatacttgagattccatccaatttatttaacttttgaccagaaagggtagattgaattggtgaaacatctatatcctgaatatttaaaagattctgttttttaaaacaaatattaacttgaattaacgtaaatattcttagtagttaaagtccttaaagaccttagtttggtgaacagataagaatcatctgtgttcagcatatgcattgccttatgaagatggtaagtcaaaagtatgagtttatttctgatatttaaatatccctgaggtatagatttgtttactctggaagtttactctgttgtttgtttgtttgtttttgtttttgttttttgagacggtgtctcactctgtcacccaggctggagtgcagtggcacgatctcggctcactgcaagctccgcctccggggttcacgccattctcctgcctcaacctcccgagcagctgggactacaggtgcccgccaccatgcccggctaatttaatttttttgtgtttttactagagacggggtttcaccgtgttagccaggatggtctcgatctcctgacctcgtgatccaccagcctcggcctcccgaagtgctgggattacaggcctgagccaccgcacccggccttactctgttgttttatttcttcattatatattacaaagttgaatgttagggccaggttagatcggaaaacaagttaagtattccttatccaaaatgcttgggaccagaagtgttttggattttttatttttgtggattttggaatatttgcatattcctcatgagatatcttgggatgggacccaagcctaaacatgaaattcatttatatttcgtatataccttatacacataccctgaaggaaattttatacaatattttaaatacttttgtgcgtgaaacacaaaagttttgactgtgacctgtcacatgaggtcaggtgtgaaattttccacttgtgacgtcatgtcagtactcaaaaagtttcaaaatttggagcatttccgattactttggaaaagtctagaaaaagtttgatatcagtgcactgaaatcattttcaagtaggaacaatagcgatactagccctttactcatgcaaaattcacagtttttatctaaacaacacaaaatcattcaatgcttttatatttaatcatctatattcacctaaccataaaaaatcaatttcaatacagtaaggaaaagacaagaaaacgaatcattctaatcactgtattttgaaagttctttgcaaacaaccgtgaaatggttaaaagataggaggatggagaccagcctggccaacagggtgaaaccccatctcttctaaaaaatacaaaaattagccgggtgggttggcgcatgcctgtaatcccgggtactcgggaggctgaggcaggagaattgcttgaacctgggaggcaggggttgcaatgagctgagatcatgccactgcactccagactgggcaacagagcaggacgtctcaaaaaaaaaaaaaaaaaaaagatggtaagagaatgatgacttgttgcttactaaaataaaggaaagattgacactataagtgatactgtttgaaatctcaggaatctctgaatcattaagattatatcacaaatggcatgcaaaatacctgttcaaaaaatactcctcatggacatgagatgctaagctgctgatactgagtctgacctaggacaatgatgttctgtgtcacctcttttctgatgcctcccagattgctcctggcctcactgctgtctcacttccaaaaatacatattgcccttattggtcataacacagagactatcagttcaaaagtctctaattcgtctcagctgcagtcatctcccagcaagacacaaggttcttgagaaaagaaatttttcatgtcccatctttgccatccaccacacgatgaacatacagtacagtgtacatagcagcccttgaaaatgctggtggaatcattgattcttgaacccaactgtcatactttccagatttaagtcctggtaaatgattaaaatcgtatgggttaccctcaacaaaccagctcaagtatttactataaaaaagggaagctagatatggaacttcccctaaagatgggtctgtcaaactcaccccattgtattctgctctgacaccatgttttttgtttgtgttatttttttttaagagacagggtctcactatgttgcccaggctggtcttgaactcctgggttcaagtgatcctcccacttcagcctcccaggtcactgtgagagattacaggcttgcaccaccatgcccagccccaccttttaatacaaataagtaacagttaccatttactcagtgctcaccttataacagatgctgttaaacgctttacacgccttagctcatttttagttaaatacattgtttttgccccagctatggtagggatcttgctaacaatgagaatgaatgataagaggggctttaaggagaattcactgccacacctttcataattttcccatcattcctccagtctttgttcaaccgtccatgatttactgatttgctattacatcaaactatgctgcaacaaaccagtggttccttctgatttttatccatctcctcctcacctagggtgagagtctgaggcttccttgagtctactttctgatattgttacatttaacacagaacatctcttgttttcgtttctggcagcttatcctctcttcgctttctccatgctttcattcatcctaaaacaccattctgacaatgatatttaggttggtacataagtaattgtggttttaccattaccttcaatggcaaaaactgcgatcacatttgcaccaacgtaatatttttcttacttaaaaaattaatgtagagtatggaaatacttgccatcagggaatggggaagaaaatggctagagagacatggtgaaagagagacttgatttttaaataactttttttgtttttcttgaattttattatcatgtgaatgcatttgaaagaaatacaattttaaaataattattaaaaaaatatttgaatgccttcccatgaacaactaaatgaagtctctattcttaaacctgacagtcaagtacagctctggtttgactccaagctacatttctagccttgtattattcaactctttttctgtttatccttcatatccgggcctttactagtgccaaaaaaaaaaaaattgctcattctactcttgtcacccagagtgtttcttctgtttttgcccatcaaaagcttacccaattgtgaaggcccagtttcaaagcaacctccttcattaatttcatccagatactctgtaacccccatagctgtttaggcttgttctagcaatttgcagttatcagaaaaatgagtacataccgagtgccagaaagtggtctctccaactgtgcacattacaacatctcattctctgtgcctccatttcctcatctgtaaaatggtcactatggtgtactttcctcatagtgatgttcattctttcaagtagttagttaggtacctactatgagacaggcactgacctgggtcctgggggtacagtaatgaataaaatagattgagtcctgccctcatcaaatttaccttctgataagaaagacataaatgaaatatacctataatgctcttgaaatagcacttgggatatagtaaatgctctataaatgtttgctattattactgtcattgttggtagtgttgttatgtggtatttctattaacacataaagaaactaaggttcacaggctgttagataagatgctggttaaatagctagtaagggactccaactcaggtcttcctgagtcataaaattcgtggcatttccactacactgatggatgtataccaggctgtacatcagaactatctgtggagacttaaagaaagtaaagattctcaagcctcagcctcaaattaactaaatcagaaattatttagacgagctaagaatctgtatttttttgaaaagttctcaaatagttgtgatacactgtcaaattggggaatgactgcactacattaaaatctttcccataatactttattatgcttatttgtaaatatcaaatctacaaattcactaaagaccatccccttgttttcttatttatttttattttttctgcttcctctcctagcaaagtgccttataaacactcaataagtatttgagtaattaatggcttaattatttaaagttgcacttaaaatgcaaatactcacagctgtggtactggaagcctgttatgaacaatcatttatcttcctagggttatttactaatcagctaaggacaagcagttgggaaagaaaggctgactatttgggaacagaactgagaaggccctcaaaccaaatgttagccacgttattgaacagcctagggccccgccttaactttacctacacttcgttgacaatttcaggtaaaatgcagaaaatatacgctaacaatcaggagattcctccctcacaccattgtagtttcatttcttttaagccgacacatgtctctcttatggaaaatatgggaacaacctgttttaaagaaagaaaaagaatcctttattcttgtcacaccacaaacatggagttcactgctatacgttaagattataaagcaaaatcccaaaaacgcagtgactgattattcacagtagacatatgaagtcaggaagcttattttttctctctttgctaaggcacaaagcctggggctatatgcatttttattacactgtactgtgttgatttcacttgaggattaaaaagagagttgaggcacagtgcacgtatcttgatggattttaggatttcttgctttcgtgaaagaaagaagcttataaagtacctcagattatcgcccagggaagtgtacctacttccatgatgacctagaaattcaatcttttgtttctcctataaaagatcacattgtactttggatgttttccctgtagttttctgcactatgtaaagccacatttggaaaaacaaaatagttttagtttagagttgaagtgaaaatatctgaaatagttcaggaaagtcttatgagcatttggggagcttacaaacagccttgggggtggggtgagggggaatgagggaagagggaggcagggggagagaagaggagggctaggtcagaagtgtgcaaagaagacagagggagagagaccgtagagactgtgagtccatggcagagttttaattctggttctcacacatctacacagagaaacaatggaagcacattgctccatcccctgtcctttactaagaagcgtgaagtaaataacttgtggcttatgatatgcgaagaagagagaagacagaatgttgtaggatttggaagtacagtagatgagatcttccggtttattgatttgtaaagaacggcttgatactggtttgtcagttctgcatcagtgagagaaaagaaaggcgcttttcagtcacttgccagaggaggagagccgggaagtggaaacagggtcttctggcggacaagcttccttgagtggtggtcaaattgactgtgaagggagtcaaggtcaggaagctttggaaatgctgcaaggatggtacgggatttaaggagggttgatttcctcggttaagggttgttgcagacttcagcaaattcccccttccagcctttattaaagaagtgtttagtagaacaaactgaaaatctacaagtatattgttacccaaaatataaaagcttctgccactgagatgaaaatgtttgatttccagtgctttatctttttgcatttatctacctgtttcagtcattcgttaatatgaatttcctaatatatgccgtcttttttttttttttcggacaataccagttctatggtatctcactgatgattatttcaaattgccacttttgttccttggaaatactcctgtgttcaaataccaggaggcataattatgtaattaccatgtgaacattatgctacttatgggccaaaatgcccctagaaaggaatgctccaatggcctcagaaaatttctgtgagaacgatatcttccaaatgtggtataaataaagctcaagaataaatagctaaggctggaatgtaaatgatttaatgtaatgatgttgtaaggtgagagccacttgactttagttcctgttgcaaatcatgagatacattaggaaaacttttaaaagggaacctattttttaagataaaatctgtatcaagttacatcaccttccaggcaaagtaattcaactttcctcttttctctctgagaccaaaaaaaaaaaaaaaaaaaaaggcagaagaaatgcttcctatgatctcttctcttcctgtcacaattttcataagtctgtagatgtaattaaaactaaagattttgacaaatgaaacaggataggaggttgattgctgcttttctaaattaaaatgaatgatacccttaaggtacttgggtctatgaagtcaatttaatgttgatataacctgactccattatcacagaatgaggcagttgcataagcaagaaaaccaataaacaaacatccaaagtgcattttagaaatcggtgaggtgaaagattaaaggcttaacaacggacaaagagcttgctgttttgttctctcttgccttccagtttgatggcagagttcatcagaattagaggaagaatgttcttggagaagcgttgggctggcactaggctaggagtcctattcatatcctgcctcgcttgtcttgcaagcatgcacagccccttcatttgaggcactgtttgcctcagcagagtctgtgtactcttctggtaggttgtatagaacataataaagggggagggctggaggagaaaggacagaaaaaggagggaataaaaaaaggagtcagattaagaaagaagtcagcacagaaatataaaatggaaggaaaaaaagctgtgatgcaggaaccttaaaaggtagattaaggatggtctcagatggcacggcattagtatcaatgccataagtcacacaaaatctattaagaattatgctcctactcagagtgagtgccatgttagcactagttgtttcccgtgatctatcctgaagtcaaacgcaagaaacactgtttaactcctaagtgccctaatgtcaggaaaacacagaaataaactcaaaggaaagacaattcagttaatctttgcattcaacaagcccaggttgttttgccgcagagctatacctatcacaaaacttcattccagaagatggccggtagaggtggctcatgcctgtaatcccagcactctgggaggcccaggagagtttgaaatcaagaccagaacttatctcagactttttttttttttattattttttcagttacaactcaaaagaatcagaattagaataataatggattttaactgaaagggattaccattagttaaaaggattttaactgaaactgtaatcagtctcaggagcgtttcccggataatgtttgggcacgtatttatgagtgttacttgtgaggatttgggagtaagaatgaacgaggaagttcctcccccaacacagacacatgcacacagaaactgtacaaactgaaaaacttcaggacaaaaactcgtgaatagactggagagtcatttgtgtgcatatgtgtggtttatttactagcatcacagcacaagagtttctgtcttttgcttttgtttttgttttaataggctcatttgtgtaagtgtcatgtctgtttcttgcattcccatggatatttatctagggtctagacaaactgagaaccagaaaatcaaaacatacgttcctagttacatattttctctagactggagtaaacatgatttatgtatgtagtaatcagtaagatgtagcttggacactaggaagaaaccacattgcctagcagtgtatttccacatggggaggtaatgcctgtctctcctaaacttctagtgaagataaaactcaaagtagagtaattaacagaaaggtcaaaagacaaagtggaagcccttgagaatctaaaacaaagttaaagaaccaacatttacatttagataaatttatttgaaataatttctaagagccatgatgttgttatcggtcctttttctttctttcttttattcttttggcttatttaaaagcaatgttgaagaaaaaatgaaataaagcttatctttcacaatacacagaggaatggactgagctttgggaaacagtcacagcttggaattaagagtgtgtgtcgtatcgtaatttagttggatgatttggtgctcattcattatacccagaattacgctttcaagtctaccgtattcatacttatctcagtgcctgacaaataagaggaactcaaaaagcctttcattcattcatccattcagtatttcttgatcatcttctatgtactaggcattgtgataaattcttaacaagacagataagatctctgtctttgtggacaataaacttacattctagtcaatatcttttgaatgaatgtagtgatatttcttactgaagctaagaaaggaaggtctctgcaaacagtatactgtctacagaactcatctgaaatgagaagaccaaggagaataatatatagccctcataactctcaaatcttaaatatgattatttaaaaactagagtaaaacaaatgtggaggagatttggacttcagggttgttttataaattgccgttttacatttttaaatctagtattataggcaaaattgaatctaaatggttttcttcttttcttttttttactttcatcatcaaaaatggaagaaaggaagaaaaggaggaaggaagaaaagaaggaaaggaagaagggagggagggaagtttttcaaaagcttgtgtcagggatcttgaaaaagaaatgattcattcaaaatatagttgttaatagtaaagatccgtgaataaacagtacattaattcattcaactaatattaatttagcacctattatatgccaggtactgtgctactcactgaggatttagcagggaaagatgtgtccctgtcctcatggaacatataaaaaaggacctttttttcctgagatgcttttactgaagaattgctgcaacctagattatgagttctcatggaccagatggcagttttctgcccatctgggatagttctgaagaatagaccctcgtgtatcaatcaaggtttcttccagttctaagctttcgtgatctatgatctaatagttgaaacaggatgtatgcttccaaaaagatgttatatttgtattacttttataaaaggaaacagagacatgccctattaattcagaagagattgggttcctcctggctgtttaaatcattctatttaaactcctttatctcttctttcttggctcaccttccaaagctcactcttaccccttttagtctcacttccctttcctttctttaattgctgagacaaattgttcatctctaactggctatacatgacatctccagttaaatgtttcactgttaggacaaattcattatgttccaaatgaattcatacatacatatgctatttcttccttttctgattttcatattgccaccagcaatatcttcattctcccagtcttccttactcgaaatccaagagtttatttgcttcttcagatattaatctccaacaccaaattggatagttcttcctcctttcaaaataccttctcatatgtaccttcttttacattgaatacaatacagccttaattctaatgcatatcaacccaagtctagtaagttacaacagcctctttctgatctcagtctcaggtgccctttcgaatctgttttacactatactgatcttcccaaaccctaactttcctctaaaatagtgagtcatgtcacagaaattttcagtggttctctttgcctgcagggtaaatcttgagcctcagagtctgggacgccttgctttgcatcatcggctttcaacatgactaactaattgtatctcactgtcgtcctcaacaccactgttctgcagccccaagcctttcttcagcttgtcactacttcttacctccaaacctttacacttgcagagatcagggactatagcatttgttttttgcctatctctttcaatattaacaaatacttataaaatgaataaaccaccaaggaaagaactgattgtgccagaacataagacacaggtatatcatttctggcttttgcttcctgttttgtatataccacggtatattgatttaacatacagccagttagaaagatctaatgcatggaggctctcgtttaatagattatcaaatttcatttccttgcataattgctcaaagaataaagtgctttgttcctaagtcccaagctaaagctttcgaggactttggttgctttcaagtttttctcattcataaatttgtttctttatttagccagttgtgcattcaatccacacaaaacctttctccagtgataatttgtggaaagaaatattttatgcttaattcttctcgctgtcataccttctcttaagtttgagttatgaagatggaaattcactttgatctcattttaaaatcttgacaatattgaatgtacactggaaactaccactggagcgctccttgtataagaaggcaaaattcttcagagagaagattgggagtctagaatgaactttgatgctgcatcggctcagtccctatgaaactaacattcttactagagaaagtggcctatggcacagtcataatcctttaccatctacatcttccccttgggatttctttctcagtatgtgcaaagatttctgatcagtgtccactcccatatggcatcttcatcttctcctctctacccccaaacactcacatttatctctagattgatttattcatgaaatgacccattctaaatttagaaataatgacatatgcccaacatttatttgcacgcgttttcccacaacctttctctataatcttatggtatcacattcttcaagaccaggaattgaccttgcattgggccataaaatacgttgaacaactgcagtttcatcgatatgcacactagaattggtctgcattcaataaactgattaaagaaattaaaaagccaattacttattaaatatttataaaatactttttttcaactttaatcttcaggatagcagttaagagcaagacccagactgaatgagtttgaatcctagctctgccaatttactaactactgaagcttaggcaagttttttttttttaacctctcatgcctcagtttttatgtcaatgaagtcggggggaataatattaactcctattgcagagttactgtgaagatgaaataacataattcatattgtcatgccacatattgcttaataaacattagccatttttgtattgtatgtggtgccctgcacattatagtctattgctctccttttttgctttttttttttttttttttgagatggagtcttgttctgttacctaggctggagtgtagtgacacgatctcggcgcactgcaacctccacctctcagattcaagtgattctcctgtctcagcttcccgagtagctgggattacagatgcccaccaccacaccaagctaatttttgtatttttagtagagactgcgtttcatcatgttggccagaccggtctcgaactcctgacctcaagtgatccgcctgcctcggcctcccaaagtgctgggattacaggtgtgagtcaccatgcctggcctattcctctccttttattaaccataatagtagcaagaacagtagctggtaacatttattgagcaattaccacgtgacagaaactaggctaaatgctttacattgtatcatcttatttaattcccacaaaaccctataagttatattattttccacattttactgataaggaaagttaagaataatttacccagggacattgattagtcaaggttctccagagaaatagaagcaacaatatacatatgtatgtatgtatgtatatgtgtgtgtgtgtgtgtgtgtatatatgtatgtctatgtgtgtgtgaatatataaaattaagtattatctcatgcagttggagactaagaagtcccatgacctgctatctgcaagctagagagccaggaaaattggtagtgtgatttcagtcccagtctgaaggcctgagaaccaggggagttgatgatgtaaatcccagtgcaagtgcaggagaagactgacatcccagctcaagcaggcctgcagggaaaaaaggaacatgcctttttgttctgtttaggacctcaactgacaggatgatgcccgcccacattggggagggcaatctactgaatccactgaaccaaatgctaatcttgtctgcaaaacaccctcacagacacacccagaaatagtggtttacctgggcaccccatagtccagtcaacttgacacatagaattaaccattacagacctgcagtcagtgcactcagtgtcagtaggcatacttgtttgttccgcatcgcttctcttctcttctctctctctctctctctctctctctcacacacacacacacacacacacacacacacacacacacacgtaccacatttactcatttactcatccatttgtttggtcaactagtcattaaacaaatatttgctaccatatactatgtgcctcctgcagaaagggttggagacattcgaagagaaaggtaaacaaaaaatggtccctgctatcaagaagtttccaatctattgcaagacacactcatgtccatataactaaaatgaattatatgatagaagtgcttcaggtataaaccatatactgttagaatgctgaggaagccattaattctaacctgggagatgaggaagtaaacatataaacactaacagcattgatctgggagagaagtggggtaagagcattgccgagagaaggagcagcatgaagaagccacgcacaagagttatattggatggaatagtgcaggacaggcaggtagttttggtgggcttagcaggtagagtttgggagtgcagggtcataaggttgggaaggtaggtttgatatgtccctcatgcttttgtgtatataaaataaagtaaatcctgcattgtaggggaaccccacttggttatccacgtatttgggccaagcaaaaatgggcaagtctagggagagagtgaaaaaatgagattgttctggatatacactaggcacttaattgatattggaaggccagagttggtttgagaccaggctacctgagccacttttctgatgagattaacatcgatttttacctctcgggaattctgcacaccacgggaactaccccctgagttctgattgctctgtgcaagctctgatcaacccctagtttagcatggactgttcacaactaaatcaaaatccagagttagagagctaggatgcctggagccaccacttatattggattggcaaaatgccaaataagtaagtatagcatgtcacccgtaaaattattcctttcttccccaccaagaatagaactcactaagttgacagcacactgtgtcaatatattatagaaaaacctaataggaagaaaagaatggcagttttcactgcatgccccctaaaggtatatttcttaataatttccaagtccactgaaaactgaattccgaaaattagttttatcttactacccaccctattttatcccaaatttaagccttgcctgtacttctttgatacttaatatttttttctttgaggtggagtttcactctgtcacccaggctggagtacagtggcgtgatctctgctcactgcagcctccctcctgcctcagcctccctaggagctgggactacaggcatgcgccaccacacctgactaatttttgtatttctagtagagacgggttttcaccatgttggccaggctggcctcgaacttatgacctcaagtgatccagccaacttggcctcccaaagtgctgggattacaggcatgagtcactgtgcccagcccataattaaatattaatcaaccactggttaattaataattatcaataattaaatatcactcaatgatttattatctattaatcaatattgcttctttaaaaatttgtcaaaaacaatagcctaagacttaaagacaagacatgtcatttctgagattctgtagtcacctataccaaatgtcaccctccctaatgtttttgtgaaagtaaagatttgtatttttttatggtactaattgaagcagtagttcatttgtggctgccaatgagttgactgtaaaaaaaaaccaaaatctcattttaacattgtcgagagaggaaatcctttgtgtttggccttggattgataaaaacgagtctggaatactatatacggtaagtgaatattaaaactagagttatgaaatgttgctttagtgttctcagtcttggagactcaaagtatcttatcagaaaggatacattgttttaattgttcctcattatatagaatgagagaacatcatttctctccttttcctcccaggtggccgtcgaggaccgagtcaggcagctgcatgaagcccacagggactttggtccagcatctcagcactttctttccagtaagtcattttcagcttttatcacttaactttattgcatcttgattaataagaataacagttgaaaaaacaaaagaattaagagttgaattatagtaatcttttatcagatgcagtagaagcataaatcatcctgaaatataacttggttgataagttgagaaggttaggaagaggaaggccaattggatcattttgtccagtcttcagctaatgcataattgtttcctgcactatattctcaaatgttaaccatattaatatttttgagtctttttgaaaaatgtggaacactttgctcaggagccatgctagtattctctgtatcattattccaatgttagtatatgggctgctgaagcaaaaacatacttttgagtttttaatttctgcctatcagttcagttcataaagctaataattatgatatcatgtaattataatatgatcatccaatatatgttactgtgactctataattctttaaataattcattaaatgatccctgccttatgaaatgagtgacaattctcaaaagaaggcatacaaatggccaacaggtatatgaaaaaatgctcaacatcactaatcaccagggaaatgcaaatcaagaccacatgatatatcgtcttaccccaattagaatggctattattcaaaagacaaaaaataacagattctggtgagaatgtgaagaaagggaactcttttacagtgttgatgaaaatgtaacagtaaattagtaacagtatgaagattctcaacaaactgtaaatagaactaccttaccatctggcaatcccactactggttatccatcccaaagctaagaaatcagtatatcaaaagggtacctgcacttgcatgcttatcacagcactgtttaaaacagcaaagatgtgaaatcaacctaagtgtatatcaacagatgaatggataaagaatatgtggtatctgtacacaatgaaacactgcaagaatgaaaccatgtcattcacagcaacatggatggaactggaggtcattatgttaagtgaaataaccctggcacagaaagacaaaaatcgcatgttcttactcttgtgggagctaaaaaaattgataataaacatagaatagaatgatagatactagtggctgggaaaggtgtgtgggtagagggggagataaagagagggtggttaatgggtacaaacatccagttagatagaaggactacgttatatcatttgacagcagaatagagtgactgtagttaacaacgatgtgttgtatatttcaaagtaccaagaagaaagggcttgaattgttcccaatacatagacaaatgacaaatactcaaagtaatggatgcctcaaataccctgacttgatcattatgcattctatgccagtaaaatatcacattacctcataaatatgtaaaatattatatatcaataataaataaatactatgcctccaagttgaaacctcagcctatgggcatttcctttccctaactgtttgcatccttcctttttttttttttttttttttttttttttttttttgagagggagcctcattctgtcacccaggctgtgagtgcagtggcgtgatcttggctcactgcaacctccgcctcccgggttcaaactattctcctgcctcagcctcccgagtagctgggactacaggtgtacaccaccaggcccagataatttttgtatttttttagtagagacgaggcttcaccacattggtcaggctggtctcgagctcctgacctcaagtgatccactcgccttggcctcccaaagtgctaggattacattcgtgagccttgtattctccttttgttcttgacctctagccattctttttatttactggttttgctattttattaattatgtttttataattaatactaagagaaataaccttggttaactgaaagtttaagtattagaaaatcctatttatacaatattgcatattaaattggcaagcacctgttttcctctgattaatgttaatttataccactttttatttgattataaaagtatatgtgttgagttttttggtatttaaaaagccatactttaccacatggagttaacatctgttagcattctgatgtatttccttgtggtcatatatgagtatatatgagggtttatccatcattttaacgcaattactttgtgcctagaaatgttacagattttaactagtttaatccttatagcaatcccttcaatcccttaaggtaggtaccattattatacccatttcaatgatgaagaaactgaggcacacattcatacagctagtagatgagggagccaggattgaaactcaagaagttggctccagagtctgtgtttttaagcatcgcactgtaattttacttaatttatatattttatagagaggaagtaattctgtatgatctccattcttctgccatattctttcattgccattttctgatcatttcctttcttttccattctccacgggttaataaaaagatccacgctcacaaatactttaaagtatttgagtagatgttgtcatgtgtgtctccagttggctgttgtctttttgaacaaaatttcctggaaggtgttggtcctgtgtttttgtcatacatcgataatagattaagaagaagtatcttattttctggactggctctaactttattatccgcatgtggtctagttatttggacacagtttcacaatgctttggagttgccaagaaaaagggataagttaaagcagtttatctaaatgagtgggatcgtggcttttaggaacggctctagaaaaatgataaaggctacagatttcgtcttctgcatctttccaaatctctggtctacttaacttgccttggtgacagccattctattcgatttaattgagattaaatgtgataacatactcctaagcgactcataaaccataaataaaaaatagtactattatgaatattaattactcctcagacaccaggtatattcattcatattttcttctccctgactccccctctgaattcccatgtcttacccattaaaacctattttcagaaaatgatatactcatttaacccaagtgataggtaaagtttaatgtgtacttctcctgggttatttgcattttattagtgtgaaaatccataagcctgaggtggtagaacatcggccataagctctgagctgtgaggaaggaactttgaggggccaaggggagcattctcacacctttcaaaccatatcacatcagtgcccacttccagaaaggtcaggcctgttagacacaggtattcataaagagactgatctacctgcctgaatggagccagccccggaagtcatcagtctcttggatgcccatgtggaatatcaatatacgcttaaaagctttgcttgcaggtataaagaaaataccaacttggtttaagggatatttaagaaataggacggtgagactaaggatggattgtttctttacattgtactttttaaaattacaaaggtactctatacacatcaagaaaaatttggaaagcccacagtacaaacaagaaaagaaaaagtatccataatcctatgactcagagataatcactatcagaaatttggtttatatactttctgtatttctcttgtggttgcgtgtgtgtgtgtgtgtgtgtatcaaggttctatcttttatttttttatttttttgttttttgagacagagtgcaatctcagctcactgcaacctcccccgtcctgggttctagcgattctcatgactcagcctcccgagtagctgggattacaggaatacgccaccacgcttggctaattttttgtatttttagtagagacggggtttcactatgttggccaggctggtctcgaacttgtggcctcaagtaatccacccactgaggcctcccaaagtgttgagattacaggcatgagccaccacgcccggcctctctcttttcttttaaaccatgcgcagataaaaacatgctacagttttatgagctgcttttttcccttaaaactatctttccaatattttcgtgtgtttaaatattcttcttcagagtaatttttctaatgactggctaatactctcttctgtggctgtaccaaatttaccaacacaattctaaattgctcaatataaagattatttcacaatctttattatatcgagcattatggctaatatcctttttatacctttacaaatatctcagattctttctacaggataaatgcctaaaggtggaattgtcatgttaaagaatgtttacattcgtaagccttttcaagtgtattgccaaacttacctctagaaaattgcaccagaaattgggtgtgccatccaaaccgtatttgagctaggcatggtgtggctcatgcctataatcccaattctttgggaaactgaggcaggaggatcacttgagcccaagaggtcaaggctgcagtgatccataatccacccccccccgcactccaatctgtgtgacagagcaagaccctgaccctaaatttaaaaaaaaaaaaaaaatcaccatatttgaagcaggacatctctgaagtcacgtatttgctactataaaagcagcttccccccaccaatgaataaaaatatgttttaaatattcctctaaggtcatattaaatgaatttgaattgatacttttttttagacaggcctgagttgatacatgtttagtaatgtgctttcaggttactataaataataatagggtggctcctaaagcttagaaattacaaagaaaagaaaaataaggaggaactactaattgcacccgccagcgtaaacatgcttactgtctctgtttatcttattctctctctctctctgtctcgcacgtgtgtgcactctctctctctctctctctcacacacacacacacacacacacacacacacacacactcccctttggaaattatttggaaattacattaccagctgtctgttgtttatcagaagacagaggcagccttttactaaaaaaaagaattcactgtttcttcctggtggcccaatctctacatgttaaagaaattttttcttttatcttagatctaagagaaaatgagaagagaaaagcattgtgaaatatgacccttctccgctgatagacactaacttgtccttacttctagttttaatacactgctactcctaattgacttctacaacttaaaccaagaaaaaggagaaattctaatagtgtgacttcaaatatgtatataatttacaataaaattatcatttaaattatttaaattatatactaatttatagttatatatgtataattggtaggtatattgtcagtctcttcatatgtctgtgattaagaaagtactaaagtattcattggttggcatagtagtctgaaaattgtccttttcttttgaagagtttaaagatttgttgggcgtggtggctcacacctgtaatcccatcactttgggaggctgaggtgggcagatcacttgaggtcaggagttcaagaccagcctggccaacctggtgaaacccccatctgtactaaaaatacaaaaattagctgggcgtggtggcactcgcctgtaatcccagctgcttaggaggctgaggcaggagaatggcttgaaccctggaggtggaggttgcagtgagctgagatcatgccactgcagtccagcctgggtgatagagagagactctgtctcaaaaaaagaatttaaagatttttcctgaccattatttcaattctctggtcttctgttctaaattctacttttctcaccaagaaagatcactatatatttgggtaaagggagaaatcattctataacagtaaaaagaatccatggttttcttaatattttacaagttccagaggtcccttaaaagaatattttccaagccaggttctttaaaacattaatgttatattaggttttgataactgtcccttgaaaaaaatagtactgattaataagattggaaaaacactaggtttcaaagataagcaagtttatttcttgttagaattcttggaatttttattatacactgagactctaagaggataaggagtctatagttctccagttttaggtgactgtggaagcctttttcaggcacaccagttaatttcacactaaactttatgccatggatcacagtgaatctttgccttaatgtggtatttgccagatgctttaatgacaaaaaatttctgctaaaggttgtagaaacgtgatccaattaaaaagaaaatgagtatttatgaggcaaaagggtcaagtccctctctttactgaagttcccagccccactcccacccaggagccctcttgtgctgtggagtttcctaactggagataagcttagaaagtatctataccagtagtttccaaactctgaggtgtggctcattagcaaatcctaaaatcagtttaatgacttacaaccaacaatttttgactggtatggaatggaatggaatggaacagattagaaaatatcagagtgcattacctaagcaaggttaagtgttgttttggcggtggttaatttgttagatatgtgtgtacatgcgtgtgtgtgtgtgtgtgtgtgtgtgtgtgcgcgcgcgcacgcacgcgcgcacgccagatcacagtgtaaaacgtttttcttctgtgggttgcagtcgaaatagtttgagaaacattgaatcattcgagccctttccttattttacagataatgaaataggtgcagaacgatcaaatgacataaccaaggtcacaaagatagttataatactgggactggaacccagtttctggacatccaagccacacatcacactgccttacccgttaagaagaaatgcccaggccaataactgtctagtctatctgctattgccaacgattattctctcgtatattcctcttcgtttggccatcctaagttgatttacataacctaaatttttctctcaacacctctgggctaaaaactgccttatcaaaatggtatcgatagcggttaagagtaaaagctgtaaaatgaaactgactgggttcaaatattgactcagacactttatgcttttttctttctctttattcttcatctttaaaatagggataatagtaacatatttggtcaattgtaagacacacttttccacccacgtttcaacagttctgaaatcagaatgcaccatacgaccaatgggatattgaattcggtgaaatatggctgtattatttcatagggttacagtgaagatcaaacagttaatatttgtaaaacccttagagtagtgcctggaacatagtaagtgctattcaagtgtttgctattagctttagcattagtatcattattactatcagcttgatagtataacttaatgcatgcctgttagagtcaaactagtcatgaaagtttcattcattctcttgcatttaatggtcagtataagtagttcctctcctttctgaagatgatttccaaggatctaatctgaaagtccagtgttttgcacattagaacggctcaatagttgtttgtataactaacgagtgataaataatcaaaaagatagaccttaatctctaaaatgtcaggatagtattagtcttgttgacagttatattctacagtacctaatgtggtatgtggtacttggtagatgttcagtaaatatttacagaatgaattatgtcttatacccaaaagaagaagaggtaaattcactcttgacattgataatacacagaggcatgagatttagcatagtggctatcacatagtagacactcaataaataatgtgaccttttctgttgcttctcagcaaagactaatagcattcataactttatatggtcgtttttatcaaagtcgactgtaccatgtaatacattaagggaaaaggctgacttcaaaattacagcatgatcacaactatattacaaaataaaataaaaataacagaaatgtacacataaaggaaaaatggaaaataaaaagataccaaaagacaaacagttattgcatcatttctttctttttacttttacaaattttctggtaatagcatgtactacctttgtaatggaaaaaaaacaataaaggtaacattttatactccagcttttaaccagtgacctcttgcagtggcaatgggactctgaaagacaaatttcctttttactatttattctgaatttaaaagctgtttcattgagtgaccttctcagattatgagacactgtaaaaagaaataactgatccattatttcttgcaggctttacaatcttaactgccttaatcatatccctggttaagtctttttctctcttgtcaaagtgactcaagcttttacagtttctccttgatacatagggcctagcagtttgtttctatcttgagagttgccaagctttcatcctggacattccccactacacatacacacttaattttaaaaaataggggaaacctttaagcacatctaataattgctgacatttcacttaacagtgctccaacctatgctaccagtgtcctcaggggacagacaatttgaaatatgagtggggcaataatttaaagcttcagattggcttaaataagccatcatgaggccgggtgcggtggctcacgccagtaatcccagcactttgggaggccgaggcgggcagatcacctgaggtcaggagttcaagaccagcctgaccaacatggagaaaccctgtctctactaaaaatacaaaattagctgggcgtggtggcatgcatctgtaatcccagctactcgagaggctgaggcaggagaatcacttgaacccaggaggcagaggttgcagtgagccgagattgcgccattgcactccagcctgggcaacaagagtgaaactgcatctcaaaaaaataaaaacatcaaaataagccatcatgataaaagtcagaaagaattttgcaggtccaatgtgagatgatttgcaggctaaaattctctttcaagtaaaatctcagggtgaaatgatttgagccagtttcttcagcagtcacatgttgtcccaagtgttaggaatttgggacaaatgccatgtgacctaccagtgatgctgataatgcccctataaattcaaagacagcctttccaatgcccataaaaagcagctacagcagtaataattatattctcttcttaaaatgtgttgtcatggcccttttctcctttagctcaaatgtatactccccaataagctctcagatttatttgctttacagtatcattagcaaccagattttgcatcgttggccctatatatcccatcaatttgaacacatgaggaaacagaacgtttttgtttctgctatgggaatttctgtgctggggctggcttacaatggctcaagagagccaattgtaaaatatacaggaattgtgagctagttattaagcctacctttggtagcttgaaatcaggcatagtgggaagatttactccatggaaattggcaaatactacaaattggggcactttgttttttttttttttttttttttgtgcatagatggtttcccagaaatgactaatttatctatgttatttggatcactcaagtccctgtaggcaaagaatcttcataaacttagcaggaaggatgctcaggatccaaatatttatgtgcgttgcagagtgaccactcatcctggtttgtctgggactttcccggatttagcactggaattcccattttccaggaaatctctgtagtcccaggcaaaccaagatagttgctcaccctagccttaggtaaaatccctagaagtagagccctatttagatagatggggcttcttgtagaagtaatttgttcaggtgaaagggagtgagggaagcaggataaagtaagaaggatgctggtcaaggagttaagtgggaaggaagagactcacttcagcttgatcccacagggagctctggagaacaaattgtccctactttgagataaggggcctgggctttttgtttgtttgttttgagatggagtcttgttctgtcacccaaactggagtgcaatggcgtgatcttggctcactgcaacctccgcctcccaggttcaagctattctcctgcctcagcctcccgagtagctgggactaccgcgcctggatttttttttttttttttttttttgtatttttactagagacggggtttcactaggttggccaggctggtctcgaactcctgatctcctgatccgcctgcctcggtctccaaaagtgctgggattacaggcgtgagccaccgcgcccagccagggctgggcttttattttcccgtgtgaattagtcattggctgtggatttctggggagtaggagatagcaaagcagttcccatttggccaagggaggatttctggtgaaaggaccaatgaggccttagcaaccaacactcacaacaactgcggctgggtgaaccagctcagtaaaagggatctgagtggaacaacaatagtattaacctctcctagactttatgaagctgctatcataccccatgcataatctggctttagagctgaatgggcgcatttagctggatcactaaccaccactccttcgtcacggacttacatggaaattagcccggtggcatggaagagatgagacaaatgtctgtttctttcttatttcatcttcctcattgtgacagattcttctgggcctcatgaggagctagggccaagagaccagcaccagagttctgaatcagttttataacatgggcactattttggtggaatgctggctctgaagggtgtatttttacactacccagaaaatgaaggcatttgtgaatttggcctggggtagcattttgtcatctgtccaaaatacaaagctttgcacaacagaaatagtgggatcacatccctgtgggcaagaatcattactttcgtttttccatttggatgttttccattttcagaacacaaccagtttgggattacaaagtactttctggtgagaactttgaagtgaggacaaaaggcattttgttctttagtagacttacataaactgttcctggtttaaaaaccattctagatttttaaatagactttcagatatctgcagtaaaaatcatcttgatttcaggcgactgcaggtactgctctgttatgtgctatgtctccttaaggctgtaagggacagggataggcttaggtgataaggaacattttcaggatacagagaggcatgaagaataacatgggccgggcgcggtggctcacacctataatcccagcactttgggaggctgaggcgggcggatcacgaggtcaggagttggagaccaacctggccaacatggtgaaaccctgtctctactaaagacacaaaaaattagccaggcatggtggcgcacacctgtaatcccagctactcaggaggctgaggcaggagaatcgcttgaacccaggagacggaggttgcagtgagccaagatcacaccattgcacaccagcctaggcaacagggcgagactccatctcaaaaaaaaaaaaaaagaaagaaagaaaagaataacatggaacaacagacaccacgaaacatgtttgcttctttctgtatatgcatttgctgccatagacttcagactattacagtatcatatcttctctcttctctccacctaacaccttctacttatagtttctactttcttatgacttccattttcttcctttgttatccgactttttaaacttccccacccatctgtcatctctgtttatctctgtgtattacattcaagctctccaagacaaagcatctgattggattagttatttattatccatctaagggtaatgccatctcacaggccacaggccagactgtaaactaggctttcttgacctgggcactattggcatttggggccagataattagtggaatgctggctctgaaaagtgtatttttacactactcagaaaatgaaggcatttgtgagtttggcctggggtagcattttgtcatctgtcctagaatacaaagctttgcgcaacagaaatggtgggatcacacctctgtgggcaaaaattattgggggctgtcctgtgcattatctctggcctctactcactacatgccagtagcactcccctcccttagctgtgacaaccaaaaatgtctccagacattgtctgtctgatgtcccctgttgggtgaaattgcccctagttgagaatcactcctttataccaatgcctgcacaatttgtggtaatgaaagtcatgtggaacactaaatacagtgacctatgcctgaggaattatttgaagttgcttttctgcatccttagggaccctttagtctctcgatgaaagggagtgtcctcagcagacaatcttcaggaattgcatcagctgcctcacccaagatcataccccttacaggggcagctcttcctgatcagtgtaggggaataatgacctggccattttggcccaactcaggagaacattaacattctagctcaagagctcccatggggttgaatgagactgtcactgggtctgcattcaccttgacttctccctatttctattcctgtttctttcacttcccttccacagttgtctatcctgctctctaatcattgccttagagttggcttcctggaggaagccaatctgtgagggggcaatgaaattgacaggcatttagaagcatctaagaaaaaggtattataataggcccattacagtcactgggtaatttgatttactcttgctttcataatgaggttgattattttgttcaggataagtagtgattattattatttaaggtgtccaacctcatgatctccattaataggtaaggactttggggacagcataaaattacatgaatctcttaccttaaaccttaagctcagcagcatacatgcccatgacaggcaagagttagaacgtaagatggtcagtaacatagatcttgaaaggaaatatgttggagtgtgagcactttaagggcatagggcctgcattacttttttattaaaaataattttgcatctaacacaacatcttgcatattagatgcaggatatgccttgattgaatgaataactgggcacttaaaagattgttcccagtctaataaaatgaaagaacttagcctggtgcttagtctaatgtccagaaagagttaatgaacttcactttatcttcagtcagttaagaattgattcactttgttactcaacaaatgtctgttgaatgaccaatgtaaatcaaactctgatctaggaactggggaaacggcagtaaataaaacaaagtttatttattgtggagcttacattttaacaagagaagatggacaatcaggtcatgataagtttgatttaaaaacaaagaataaagcaggctaaaggggctagaggatgggagaaggggacccttttagtggagtggtcaggaatggtgacatttcagtagagatgtgaggaagtacaccagtcagatattgggggacaaagtgttccaggtggaggaaacagtaaaagtaaaggatccaagatggagcatgcttagagggtttgagaaatattaatagcaaggaagccagtatgactgaagccaaggaagaaagatggtgaatgataggaggtcagtgagtgaccaagggccagacgaggaagggtcttatcaactatggttggctatcgttaaaagcctttggcatatatgctttgtgagaagggaagtcatagaattctgagctaagaagtgacatggtgcctgtagcattgttacttactgtgcctgtagtattcattcattcattcctatatttattaacaaaaacgagtcacctgaaatatgaagataaaaagagaattattgccttgggacatttaaataccaatcacaaaagacagacctataaaaaatgacctcctacagtggtagtaaatagtgggtgcaatgggagtagaatggaagggaggaatccattccacagtgagagaaaggagatgttctatctagttgagtattaacgcatattgtccctgaggctacatgcaaatccaaagtagagggtattccttttgataggaacttagcaaagaatgtttataattgcttggtccctgatctcacctagcaagagtcacaagatgcattcagtgatgaaaaatcagtttctcccttctacttagccattctgataagatgaatatctcgggccgggcgcggtggctcacgcctgtgatcccagcactttgggaggccaaggtgggtggatcacctgaggtcaggagttcaagaccagcctgaccaacatggtgaaaccccgtctctactgaaaaatacaaaagttagctgggcatggtgacaggcacctgtaatcccagctacttgggaggctgaggcaggagaattgcttgaacccaggaggcggaggttgcagtgagccgagatcgcgccattgcgctccagcctgggtgacggagcaagactctgtatccaaaaaaaaaaaaaaagatgaatatctccctttccagtttcgtgtgtagtctccttaccgcccttctgttcagaaaagggatttcttacgtatgtataatgaatataaatataggttttagagagcactaatgttttaatgagatagaaataggcagacgagagagaataattgaaggattagtcaacatgagggcaatttgatagggaaagaaaaagtctgagcaggaaatgtctgtggaaaaaaaaaatcgaagaggaatggaatgaaatgagctcatttatggtgtgagttagggacagaagggatttattctcaggaggtgaaaagtgaaggagttcatgttatagaattcgacctagaccagctatcaagggaaagaaagtaattcaaaagacttggtccaggagatctggagcagatacatctattagaggaagattcagttttgaactgcatcttcagttattcctggaacccaacacaaaagctcatgacaaccttgttatcttcaggcaaaaaaaaaaaaaaaaaaaaaaaaaaggcgggggcagcaaggcttatgtcttaaacaagacagcacataacttcaggtcagagaattccattaacatgaatcacccacaccaatttaaataggaaaaaaaatagtaagcttggttatgtaaaaatttagtttaaaaatcagaaccaacaattgaaattaaacaagaatgttttatttatttctaaaaatatttagctatttattttgaattctgaagcaatactaatatagtatataatgataaaacacagttgattttcatagtaaacatcagcatcagaatgccaagaggaagatttgtctccgttcatgttttattactctgagaaccgcgtaacattttttaaagagtcagaaaatggctagaaaaagaggaagaaagattatttccttaactagttccctggtcccatgctttggtggttaacagtcagtttaactctagaaccatggaaagtctctgtcactttcctggttaccctgggattcctcacattggcagtaagttcgtgaatgagataaatatcctgataactagctacattaatgatgaaaataattataaacgtaggagttggaatttttaaaaagtatcgagcgctctgtgctcttaacacagaggaagcattttgcatagattaacccgtttaatcctcacaccaacctttaaaataaggactgttattgtctccatttcacagaagagaaaactgagactagaacaatttactaacatattcaagttcatacttgtaactattatggattatcagccttagaaaaggggttccagacaccagtgaatagcaacccacacgtctcaactgcacagaccaaagaggatgataatccccattaatctttgcatgttagtagaggcagtggctagtaacaaatgggagagactttggctggaggatattttttattctttaatctttatgatactgtttcccctctccccttctctctctactcctctctctgtcagctgtatccacaataatgccacaatataactactatacaagaatataaagcttctgttctcatgcttatgggtctacaggtcaactgtaattcgggtgatctggataaaacttgactggaaagctctacttcatactgaagcatgcctgggttcgcctctaggctgtgagttcagtttagatggtttctaaatgtgttgggttgtgagccccagactaaaggatcagaagcaacctggggcatgttctcatggcagattgccagtgtgacaagcctctgttcacatcatatctgctaaagcaagtcacatggtcaagcaagccaaggtcaaggagctaggaagcacactgcgctcaccatgaggccatggctaaggtatacatgtttagttctttcacaactgagtgaaaaatgggccccaaattcaatctctcctatactctttttgcgttaattgctagttctttctcactcttctcgctttctaatggatgtacatcccatctatgatcatttggtttttaatatctgagttgctccctactgtctcaggtttcaaattttactttccttgaaatttccctggtgcctaatacaatacctttcacacagagagcgttcagcaaatggtgtggactgcctgtcgtcttttaaaagtacatctgcagagacagtaaaggcacctggcgatattgcattgacttgttagtaacctgacttaacccagatggcccaaagactgtaaccaccattacctggaggaaagttccctggtaatgcagtcagccaattatgttcgaatttactcgaaaattccttgagcataaattattcatggctctatttatgtaggtatctatcttcctatatctgaccttaggaagcttgattgctttcttactcttctaataatcaccgtgatgtttttgaagttttctataagtcggttagaagcagcttttttttctttttttttttcatgagtaatgccgcccaactttggctattagactttgtgtgactgtgcagccatcagcactggatattagatatagttttatctctgcaactcagtcaccttgccaagaattttagtatgaactcttgacttcccagatcaaatgtgagcctgatactctaaatgacttggcaatctactgacaaatcccatggtgtggtattctgttcaccatgtgcaatggtctcagagctcagcattatctgtctgacagctcatataatatttacaggttgttattcgttaggaattttagttagccataaagattttcacagctatggcagacattagaggtctcattcatcactcttgtgaccttcctctctggaatgtagcccatctgtctctgctgttgaaatctttatggaaagtctgcccatctttgaaagtttagtaagtgatcttaaagttttcattgaatctttacttttgatatacgatatagacatataaagcactatccttattttaatttaacgttttgaaaagtgttaaatttaacttggcctttcatttaaatgacagaaaacttactcttgctacaggaactatatgcgtcacatcaaaagaaaatagaaatcatacagaaaaaaattggaatgggaaaaattacacatatatacatatatattcaacactaataactacatgaaagcttaaatactgtattataatcctgattatgactttaggaaatgaaaacgatagaaatacattttgcatataatttaacgttataaagaaaccctaagcaaattcagtaatgaagtgaactgaataggctgggttacagagcacaagagagggatgaccaacaatcagatgttgcccctttccatttctgttttcctctttttatacacaacttctcaaatgcttgcttcccctccgtctactccctccttcagcctctgatcactagtgtgaaattgcccttttgaggtcaccagtgatcgtgggatcaaatacatcttcttcttctacacccttagtctgtcaggctcaagaattgcttatacttcaccagctaggctgttcttgtgtttcatcccactttattctagcttctgtattatttttctttgacagcagttctactgccaccgccatttgggggcatttgccagggtacattcccttttgttttcctccactgtactcatctttttttttttttgtacttttatagctttcttggggtataattatatgcaaaaatatgcatatttaatatatgtaatttggtaagtttggacatatgtatacacccaagatactattgccacagtcaaactaaagataacgaacatattcattacctacaaaagttttgtgtccctttgcttttgtgtgtgtctgtgcatggcaagaacacaacatgagatggaccctcttttttttttttttttttttttttttttttgagatggaatcttgctctgtcgccaggctggagtgcagtggcacgatctcagctgactgcaacctccacctcccaggttcaagcgattctcctgcctcagcctcccgagtagctgggactataggtgcgcgccacctcgcccagctaatttttgtatttttagtagagatggggtttcaccacatcggccaggatggtctcgatctcttgacctcgtgatctgctcaccttggcctcccaaagtgctgggattacaggggtgagccaccgcgcccggccgaggtggaccctcttaatccccttaagttttaagtgcactacacagtattgttaactataggcactatgttgtacagcagatctctagaacttactcatcttgcataagtgaaactttatactcattgaataacaatttctcgtttcccctgccctgtcttctggcaaccacttttctatttactgcttctatgaggttgactatttcagacacttcataaaagtggagtcatacagcatttatccttctatgactggcttatttcactgagcatgtctgcaaggcccatccacattgtcaccaatggtaggaaccttcttttttttaatgctgaatggtattccattgtatgaaaatgtggtgtatacatgcagttctctttgtacgatcttccttccttaaagagtccagccattctcatagcatctgctatgattctagtacttatggtcttgtcctttcacttgcatttcagtgaaaagaaccaaacttatgctgatgcaaatacctgtacacaaatgttgataccagctttattcatgattgccaaatgctaatcagtctatgggcctctgattttcactgcataaaatatagactaatctgtttatcattcatgctgatgaatggtggataaatggtctagctaagaatgaaagatctgttgtatagatgtcattggtctaggaagacagagatgtagaaagaagtaccataagcccaggcagttagatactattcaaaggcatttctctctgccatactttatactacatgtggcacattaacagtagttaggagtggattcaaggctgcagataaatgctgcccaggtgagagagaaagaattggttccacaattaaccatcattcagacaacacatcatagctatgtgattacaaacattatttgtgtggtgattaacattttacaaagcaatttcatattgatttcctcattttatcctgacaacattttggtgagggagatatcattattcccattggaatataaggaaaataaggcttaggcaggaaaaagactagcttaagatcatgaagtgataggggagtcaggactcaaatccagttcttctgaatctgtactctggacattttctgctatatccagctccctctcaagatgctggattgggctttgaaatagaaagccaacatcctgagtgcctttctaaactctgagttttacagtctatcaggggaagaggagagtgtgagaggaatgttcccaaataatctactgtatcaagcagtatatctaacttgctttgagaattatgccaactaaatactattgacctgcagaaaattgatttttctctttacacttatatcaataaagagaggcttctgctgccataagtgtaatttatgtaaaatgtttttaaaacattcatagcctttaatcaagtaaatatacttctaggaattttgctttaaaaaagtaactaaaatatgtgcaaagatttatctacaaagatgttcactgtggccttacttagaacagtgaaaaactggagacaacttatatgttcccaaagagggaatttattcaataaatcatggtacatccataagtgggaattttttagcaatgaaaaatctgttgtaaccctacaagcccactcttaagcattcatcttagagaaatgaaaacttatgcttatgcaaacacctgtacacaaatgttgataccagctttattcatgattgccaaatgctaaaagcaacctaatgtctttgaacaggtgaatggataactaagctgtagtacacccatataatggcatactacttagcaatgaaaagaaacaaatcgttgatacagcaatatggattatgcattatgctgagtgaaataaaccagtatcaaaaggttacatactgtatttatatgacattctggaaaagacaaaacaagtctagtagatcctccctaatgccttttgttcaaccccagaggtgagttttctattttacctccagtgattgctgtatcggttatttatctaaactgtccccacttttttgacccacctatgttatcaaactccaaatccaccaagtatgagaaaagtagagagatgaatgaaggtatttgtgttggaattccagaaagtgctcttttggcatgtcttaaaataacattagcattctttttaattttctggttaggcccctatgttgattaaaatatgacttaacaccagggtgcatcacttggaacattctgttcatcatgcatttaaaaacggctgaaataacaacttcccctaaataatgtggcctgtgcttgtgattttcaaaactaccttgggcacaatattgaatcctgtcacctcaaggaaggaaaagcatttgaagatagaattgctaccctttcttgctcttaataacatactgtgtctgtaacacaaaaggaaattcagaggttggttttgcaataaataaatgcatgtgtagtttgctatctaaattcagtggacaataccccatgatgctggtgccgtatgataatggttgatttgtacattcaagaatctgaatcacaaagctgccctggaattacacgtagtggttataagcacatctgtataagaaaataccaaaggacaacccggtgtcatatagaaactatttgccgataaatttgcttttgatgggctactaaaaatggacacatcaggcataaaagatgtgtgtgtctattacgtaggctagctttatgaagaatgacaagcttccactggtacactgagataagaaacagctgttgttggcatcagtactgctacaagaaatgaaaaaattctgtggcacacttgtgagcactgccacatatttgatcaacttttgaatagatggaagaccagaatcatctggcagccccaaatgaaattgtcgacaacccttaagaatctcttgagaaggagcactgaacccaattccgtagaactatcatccaattgtgtgttatttctaaagcaagtagttccagtgtgtgtgtatgtgattatgatggggcagggaaggaatgaggggaggctgttgttattttcctttttttttttttttttattgtgtcaaggacatttttgagcataaaattgtaaggtttcaaacaatgactgcaaagcagttgcttaggtgaatttataaactgtgaatcaaaggggaaaaacatctttcagaaaaaaaatacactgaatctcaccattggacctatttgatggctacacataagacaaaaagcttttttaaggaaaataaatgaacacttaagaactgcaattacaaaagcttgaaatttcatattgatctagaatttataatatttttaaaattctttaaaaatattttcagctatttagttcaagcatattctgataacttctctgacatttaattgaaaattttccccttttaatgtaaacataaaaagtcaactctagataccctacgtaggtcttcccattagctcagccaggcaacgccaattttcctctgtctctcgctgcttagaggttgtttctttcaggccgaaagcccctaagccaggccaggcagccagcagccctctccagcacacttctttctgagagacgcctaagaatagtgtaggaaatccaaagtgattcttctgctatcagaggatggtctagcatcctccaaattagaaagaatttctggaccactagaatgataaaaaaaaaaaaaaactagaaaggtataataagagaaattgtgaggcctcagcccatagatacctttaaggaaagaatagccattcttttctcagtttaggtattcacaggcttggcattcacagccagtgagggctggaccaagagctctctggagttctcttcttccttttatgatgctggtattttaagaagaaggtacactgagcagccaggagctataatttctggctctccaccatgtttcctgctatagagggctagctttttaatatttccataacaacagactctgaccagataggtcaggaagtctagcccatggtttgtttgtttgtttgtttgtttttcagttggagttttgctcttgtcgcccaggctggagtgcagtggtgcgatttcagctcactgcatcctttgcctcctgggttcaagtgattttcctgcctcagtctcccgagtagctgggattacaggcacctgccaccatgcccggctttttttttttttttttttttggtatttttagtagagatagcgtttcctcatgttggccaggctggtcttgaactcctgaactcagatgatctgcctgcctcagcctcccaaagtgttgggattacaggcgtgagccaccacgcctggccttagcccatgtttttaaatcagatcttatttactctgtgaacttatttggacaggagagctgcatcctacagaagaaaaaaggacaagagaagagttgggaagagaatgagaaaggcaaagatggaaagggaagcagggaaggcaggaggaagggaaaagaaaggaatagagaaagaaggacagaaagaaatggaaagtcagagactacttcaaaacagcagctaaatgtcttttttctctgtattaaaaatttccgtctgccaaaatgaaaaagcataattaccggccaaatacaaatccatttcctatatcgtttaaatgacatatctccaaggtacaaaacagcatgtctggttaaaggttgggtgatttgatccctctattactctatataaaacaaagaagctggagtttcattacgcttaaattgtctggcagtgggtgaagttaacttttattagaagctgttctttcatattatacagtgtagtcgaggatatattagctttgacgttttcttacatctcaatacactgcggagtgaatttactgtgagactaatttaaaagggagtttttcataggaggaaataatggtcagcatcagctgtgcttcaaattattagcagaatgaaaattcaggggaaaaagtatagacacataaagttgctagatattaataagaatgcgtcttttatttctgtttctgataatattctgtgtttcttaaagctccagtgtcttaaaactatattcaggaggaagattatattgttgaggaaatgttatagtgcctcctcaacaagattattttgtcttaaagaaagaaaaaaaaccatcagatcaaacagtatataaaatatatttgtagaggttcagctttagggaagaaatcctacaacttaagcctgaaaaaaaaaaaaacaatgcaaagatcattcatttgaccaatacacagtgaagtcataataaaacaaattcctagtatgtgaaatgaaatttcacgtataggattcatcactcataacaaaagtcttattacgctctgatatcagtagacattccctcacttttggtcaccttttctaataagatcacactggtcagctgacattttgaggcaccaaattaagcatctatttggtaagtgaatttggattctctttaaaccaataaagataaaaacaaccatatcagagtgataagcatattactttagcttcaataacttagaatgtaaatatatcacagagggatatttcagctactgaaataataaaatccagtcagtcaaatagtaaaaaatattgagaaccagcaacaggaagtattataaaaaaaagcactcaagggagacacatacaagaaaccccgtcagtctactcattcagtttcttatctgttctataggtttagcagtggaaatgtttgtgggttttttttttcttcgcatttatctttgtgcctgaatgagttcagtttcgcttagattaggacagaaatttcagaacagcaggttaatccatcctgtcttcatgggcagctgagcaaacagaccaatatcagtgtaaaattgtaattctggagattaatgttgtctttcctgtttgcgatgaatttgacctccttgcctttctttttttcctcccttcttttcagcgtctgtccagggtccctgggagagagccatctcgccaaacaaagtgccctactatatcaagtaagttggaagtatcacatttttaaaagagcatttattgtgactaacctgtatattcacaagtgagtttatttttaaaatgcgacattagcctggcctacaatacctgtgtcttttttttcctgaggaagcttggataaaaaacttattctaaaattaccattgtaaatttgctgatgcaatggggaacgacttttaagaaaagtttatttaatgcaggatatatggtgtgttttgtgacagagggggcggatttttcacaatagaaccaaaagctccagataattttattgatagtgggagtcaatctttgcgagaacaatttcttttatttaggggttttctcacatttcttcttccgtcaaagatagaagatttccgcagttatatgtacacaactgttttgggtgaatgaatactacatgtttccaaaaggcagaaagcagcagtcctcgactcgtagggcttagttgttcattcttgatacataacactcagtatttgtcacctaacaacagaaagatactgttttctggaaacatttgtgccagtcaaaagaatacgagtgcttggaagcaccttctgtagtattttgcatgaaatataaatgacaatacattgggtcaacgtggaagagagaggagagaggatattgagtgattacgataccttcacagtctctcatccattgtgcactagagtctaacttaaatttaactttgaattggaaacctcaacaacaattacaatttactgggttcataaaatagtcctcgataccaaccgaagtctttgaacttgcttctgccatgagtctgactaaaaatattagatgttttcccatttttttccgcctgccatcttttatcgaatctgtttttattctttcactgtccatcaattcttcttaattcggttctaaagcaataacagcagtcctagatcttcattactacagtcctcaagaaatttgattttatgcctctattttgttaactcagaaaaatgggagtgaaggtagtcttttgactctttcaggagaaatacatactttaggaaacggtttaccatttgtcttattacatttttccagatgaggtatctcttaacttgaaaattcttttttagtatgtttgattctgctttttagttttcatattttatgaatttaattttattattgttatatttaattcattagtcactcaaaactgtacattttaaatacctatttaaatcacatgctttattaaataatatattgctgtagacatgcactgtatattaccttacatccactgtatattttatggaacaattttcttcaaactctagacagtgatttcctacatcagtgtctttgtcctcacaaatttttatttccgactaagatgtttgagacctgctacttcttcaaccaattcataaagctctcacttttatccaattcctttatgagctgaaataaagactctttttctcctttcatagatgaggttttaggatcactggagaattcaagacacctttaagctattattctccaaatgactacttgtttggggctcactagaggtctcacatggattgctagggtctccccggtcccattgtcctttccctatatattcatcttctccctgatgttacttctactacaagagatcccagtacattgctgtgagggaatggaaatgaactccgtccaaaaaataataaagagacaaattccagaaaagctgtaattcccttctgtgtattagtctcttgctgtttctcagtggaattagagagcagctacatatcctatttgtccaatgctccttcatgtacctaaagaccatggtgatggtattgataagggcacagatctatgaataagaaaacttcaattttagtcctccagtctagtcttagaggctctgtcattaggcgactgtatggctttaggcaagtcacttaacctataaaaatcttggtttctttctttttttttttttttttttttttttttgagatggagtttcactctgttgcccaggctggagtgcagtggcccgatctcggctcactgcaacccctgcctcccgggttcaagcaattctttcgtcttagctcccgagtagctgagactacaggcacctgccaccatgcttggctaatttttgtatttttagtagagacgaggtttcaccatattggtcaggctcgtctcgaactcctgacctcaggtgatccacccgcctcggcctcccaaagtgctgggattacaggcttgagccaccatgcccagccaaaccttggtttctaatttataaaataaagagttggactagatgatatctaagatcctttttagctctaagacgtaatgagcatgactcattcagttgtcctgtccaaacttaaaaaccgaagatctcagcttttgttcgataatatctttatttttaaaattcattattttaatgaacataatgtaaattcttactttaaaaaacaggaattttatttttccactgtttaattagctttagatatgccctatcaacccactccaatttcaccacacacctctttaaagagctcaaatcttggtatataatttaggattattatgcttcctggctcatgataagagagagagaacaataggcaggaaaatttgccaaaaggtgagtatggagaccttaaaagcctctgaaataatcagttccttgaaatgaggaaattacgtaatttctcaaaaatatctctgaaaccttatggagagcaattctctctacaattataatctctttgaaattagggatggtataatttctcaaatatgagtgtaaaatgttaaactgtaatatagggaaaacatacatgtttataaaatgaacattgtcagtaagcagatgattaatggcacttgtgtcttattagccattactattatctaaaatgttctatggaaaccaaattaatttgatgtacaaggttcggtggactttatgcacagcttaatgccgttcataatctgagatgccgtcttggtctaaaaagaacaaaaatacgtttacagtgacagtgcttcaaccagtcctcatttttcctcttttttatcttgtttgtcttgacttccagtcaagagtttttaccacagatgcccagctgcaaaaccaggtgtcttctctggctatgtttttaatgctttgtaactttttcttttcaatgctgggataaagggatcgcccacataacaagaggtttctataccagtggcacagttcctgttggttgttgaattgtgcactcattcttgagattttaagtcattaacatcttttgctctagtttgcaaatcaggcagtgtttatgcctgcatcctgacatcagcttttcatatgaggctaagaaccttgattttgatacttcaaactacgtgtttgtctagtttatttgtccacagcatacatcattgttacagttttcatattccctctcccttggggctcccttattcctgccagcatctctttcaggttatttgattacagctttcattgccactgaaaaaataatcaccaacaatgttcaacctgttacaactgccttttctactctctgccattttgtagttttttggcctactgtcaaactcatgaaaatttcaatataatagcctttaaccagctgctgcattctgttaggatttctttcacctttttatgttgcatgctcccatatgggtaaaccaaacagagccaagagctgggactctcttgctttcttaatgagttagaaaattgttcttctgtattctggactgtcaaaagaatttaggaatcccaaacatgcatgcaggatgttccagtatagatgtcataataaaagcataagaaatatcacactgggtcagaccaacagggcaactagcccggaactctgtcccagatgaagataccaatggttgttttgtcaggtaacctagtacattttaccttaaaaattcggatacatcatgaccacttcttaataatgcattgtaaatcaactggcagtgagtttatccaatggtgtcaaacttttcctattccccacttcagctttgtcttaataataatatgttccataaatgtaccgacttctatataaatataggcattttaatttctcttgaatctgcatcctttaacctcaaggaatggccttaattaaattctttgaaattcagtaaaaacatttatatttatccagagtcgactttagcctcacattcccctactaatgcttttcattttcatcttcccagtctgagaaattctaatcctttttagtcttttagtctgtccttgacggaaagataagctttccccttgattatcttagttgtttttccctggatcttttccagctctgttatatcttctttgggatgtcgtgactagggtggcccaaatattggttatgaaatttgttagcattgtctctagtttccactcactcatgaagaaagtaaatgttatttgctgtctcccattggtgcagaaatggagagatcaattgaggtcataacctcttctgcatatattagttctagccgaaggttggttttctgctacttttctgtaataccagcaaaagtgtttgaccttatatttctgccagctgtcccttaggaaggatttgatttttagacaagctggtcctttcctccttcaaagacgctgtggttgctaaatattgggaagaattcactaatgaaactcaggagtaaacctgctgactccatcagcagtaatgcatttcatcaggttccctttcgaaatatctctgaagcccttcacagaagagtgaaagatggggttcttgggaacttgctaactgctcagctttttttacatgcaatgctcaagaagcaactcatgtccaaaggagtgtttatcttttcctgctggtaattttgaatgttgtatatacattgctgtatatgttgcctgatgaccttgatcgacccttctcttcactctcaatctcaggcatgtttccacaaccatttattgcatctgagttttgctcacaactttctgctgcttcctgcttagcaaaatgcgatataaaaccttattggatgaagttaacagttgcttcagtcaacatttcttgttactgttgctgtttgtgctgacaaaattgctgatttgggttctgactgtcctgtcttcttatggcctaccattcctatagctctatttgtacgagtatttgactctctgcctggaactgtggccatctgtctagatttaccttttggtatatgtggctctctgtatcctgttggtctacattctggtttgaactcacggatcttggtctggtttttagtaccagtgttcccctaactccagtagcatctgaatcttgacaccaccttcccctgccccctactgtattgcctctattactactttcatggcaattttttcggattccaaatatgtcccatgcttaaagcatatcttgctctcattcttgttctagcccctgttggtaccaggcattgctccaattcaagttttggttggttgatttcttccttcataatattgattgctatttcagtacctgtatttatatacagagggagcagtgcctaactacatcttagccttaacagcaatcaacgtgttaaatatccctgtgttggctggtttgcagtagacacgtcttctgacaatgagatgggctcttattataaagaaactggagtatgatatcaacatagaaaacatttcctcaggccgggtgcggtggctcacgcctgtaatcccagcactttgggaggctgaggcaggcagatcacgaggtcaggagatggagaccatcctggctaacatggtgaaaccccgtctctactaaaaatacaaaaaattagctgggcgtggtggcgggcgcctgtagtcccagctacttgggaggctgaggcaggagaatggcgtaaacccgggaagcggagcatgcagtggacgagatcgcgccactgcactccagcctgggtgacagagcaagactctgcctcaaaaaaaaaaaaaaaaaaaaatttcctcatttcttattccagacacctcactcttctaagaatgatacaagtcttctgacattgggtttgaaaatcagttgaattttgtcataatctttcatacaatgtgaacacatcatgtagtatataattttgtgctatttctggtaagatccttcttatgtatatttttcttcaaaatataccttttagcagctaagacaacattaaataggggaaattttaaataggctaggcatcgcaagacttgaattctagttccagctttactgtcacctagctattaatacttgaccaatgggaaattgcttattttctgtgggcctcagtttctccctctgtcatttaaggaagcagaatgacatgatatcataggtcatttccagtactaacattttctgattttgtgaatgttgacttcgaaatagaaattgtttgtgatcattttccagagaagtgaaaatgaatcttcatattgcccttgaggattcttattgcaccatcaatcttatcgggatagaaaggacaaataatattaaatgtttcacttaactatttagcactattgatgataagaagtggatgcaacagagaatcagctgtctaatttgatctgtcagtctttgaggatgctggtgaatgattcggggtaattaaatttttgaaatcactgccaaaagcctgatgctctgacttttcaaaaggctttagtacacaaagataacccagaggtcaatcttctctgctgtgttttctcctctgccatttgatggtttcaaaggtcacgttacctgagtctcagtaagctctggaaccacaatgaaggaatagttggtaatacattattgatgatataatcatgaaaacaattcaggttaagatattaactgaaagagagtgaaaggggtgccatagtgttgtgcagagtgctgagtctggttttggttttatagatcttgttgggagatgtagatgttgatatcatctgtgtctcataggttcatgaaaaaaaccctcacatccttttttgtagtttcataagctgatttgtatcaccttgactgaaataacagactccaggaggatagctgttgttatctctttttctagcatagtgcctcacagataacaggtacttggtaaatattggaatgaattcatgaacatatgtcagtaattctatgtgcttttcagtttgctgactcatttcaccttcaaaacaatcttgtagtatttgtgtgtcaatttagatttaccactcaaatccatctctcatgccctctagacatgaactttagtgttaggaagcatgccgagtgtttgatagagtttctcatagctcctacagtttggtgcttaagggacagtccttggcatggatgtatgaatggtacataccaaaacatgagttctagattccgttctatcttaatctaacaatatgataaggagtataacttagctcaacctcaatgagaaggttgaactagataatgcctgggaccactctcagctctagctttgtttcagtagaactagagtctgtttttcctaaatatcattcatgaggcttcttctggttttctagtggtcaatagagctttaaattgatcaactactgtttttcactgagcattgtggacaggacctactttttgggccaggatatagtagccactgagtcttaacagaatgtcatcaatgatacatttttattttacagaaaaatgttgtaacattctatatggcatatgtcatgtggaaaggtggcaacatatatacatacacctatacatgtggcagctaaaatttaatgtgtgtatggggaaaataatcctgtattataatacacatggtatagcattccctgcctcattcgtggcacttttggaaatgtgagaatgagcatagaacatattcaagttggtttatccaaaagaagaggagtaaattatttcagctatttccccattttctttttctaactttcttaaacatgcactttcttacataatcacgtgttagaaaaaaaccagtagtcacatcaaataaatctgcatttgaaacaactgtatcatatcccaactctgttcgtttgagccatttgcttaacgtgacacccattctactttatgacacataaggaatattgcttaagaaatgttaattggctttccttttctcctctgaaactggattgaagtcttattgacctctattagatactgagtgttcaggtttttaggaaaacactcatagagatatagccccagtgtgagctgcatttttagaatattttctagaacccaaatatgtccctaatcaaagttagtttattttcattcttagcgttcccacgtaatttggggtatgtgtgaattcccaaacattcccgggcctctcctaggcttctctaattgcttcttattctgttcccctgggaagcagcatcctgttcccttcacaaaggtcagcagcaacagcccaggcaatgttttaaaataacttaataaccctgaactgcctctctcttctttgggataatttccttagagcattagtcctttgaacactgacctggttgcagaaaatgcccctttctcagtgggaaaactccaaatcccattcagtcttcccctccttccttccaggggatagggtgggggagtagggggtagggagagggtattaaatactttcttcaggaaaaatgttaacacggtaaaacactctctctctctctctctctctctctctctctctctctgtgtatgtattcttttttaaagaaatagactgtgagtgcattgtataaatcagtgctgtcacgttgcaaattttttaaaccgttgtacaagatagaaaaacagtatctctggatattgactctggaaagcttctaagagcaggtcctagatgagacttagctcactgtcggcattcggcaaatgatcacgttttctgtgataccattaactcctggggggatgaaactgaaaagcctcgctgctcttcctgaaactctcaactgcttttttctgtttttctttctcagcttatccacatccatcttggtccccaaagccattgcatgtcagatggtcagtgcaatgtgtaatttttaacttgcttctttgttgctttagaaggaatcgttttgttgttttctttccttttggtcactatttcttgttcatgagttttctgtaaacagtgtgtctcatagataagtccatgtaatctgctagacaggaagaaaagcaaagtttaatgtgtgcctactatgtgctaaatgacaaagtgtttcatctgtatcttcccatttaatccttgtaacactccacttattatccaataaagaaaaaaacggctatcagtcgggcgtggtggctcatgcctgtaatcccagcactttggcaggccaaggtgggtggatcacttgagctcagcagttcaagaccagcctgggcaacatggcgaaaccccatctctaccaaagatacaaaacagtagctgaatgtagtggcatgcacctgtggtcccagctactcaggaggctggggcaggggaatcccttgaaccagggaggcggaggttgcagtgagccgagatcacaccactgcactccagcctgggtgacagagtgagaccccatctcaaaataaataaataaataaaagttaaaaaaaaaaaaaaggaagaaacagctgagattcaaaaaagttggaggcttatccaagtcattctaataaaggggaggggggagaattgatacttaaaatcatcatgataagaaggatagacattggagattcagaagggcagaatgctgggtgaggggtggataatgagacattacttaatgggtacaaggtgcactactttggtgatggatacactaaaagcccaggttcaccactatgcaatacatccctgtaacaaaactgcacttgtacctcagaaatttatacgaataaaaataaataaatcaaataaaataatcatcatcatctcagctattgcttctagctgtttcaactttctaatgtttttgattgaaaactggccatttgtataaccaaatgtggccaatccaccactgtgaggctgccatcttgggcatcaccaaaactactctagtagtccttccctgcactgttaggtggattttccttggcgtatcttcgcaatcaagttgcagagacctaagttactctttgctgctttgggcaataaaggggaacaaaaaacaaaatgaaacaaaaacttggccagccctgatgtaagcactcttctacctccctgcaggctgagaaaacaaagtatttcttttttttttttttaatttttaaaatgtttgattctggtctaaatcaattaaaatgagatctccccccttcttttttctttttttcttctaaaaaaaaaaaacacaccaaaaaaccgagatacatgtgcagaacgtgcaggtttgttacataggtatatgtatgccatggtggtctgctgcacctaatgacccatcgtctaagttccctcccttcaacccccaaaccccaacaggccctggtgtgcattgtttccctctctgtgtccatgtgttcttaatgttcaactctcacttgtgagtgagaacatgcagcgtttggttttctgttcctgtgttagtttgctgaggatgatggcttccagtttcatgtccctgcaaaggacgtgatctcattcctttttatggctgcgtagtattccatggtttatatgtaccacattttctttatccagtctatcattgatgggcatttgggttggttccatgtctttgctattgtaaatagtgctgcaataaacatacatatgcatgtgtctttatagtagaatgatttatattcctttgggtgtatacccagtaatgggatggctgggccaaatggtatttctggttctagatccttgaggaattgccatactgttttccacaatggttgaactaatttacattcccatcaacagttcaaaagcgttcccatttctccacagcctagccagcatctgttgtttcctgactttttaataatcaccattctgactggtgtgagatggtatctcattgtggttttcatttgcatttctctgatgatcagtgatgttgagctttttttcatatgtttgttggccatgtaaatgtcttcttttgagaagtgtctgttcatatcctttgcccactttttgatagggttgtttgtctttttcttgtgaatatgtttaagttccttgtaaattctggatattagacctttgtcagatgggtagattgaaaaaatgttttcccattctgtaggttgcctattcactttgatgatagtttcttttgctgtgcagaagctctttagtttaattagattccatttctcaattttgtcttttgttgcagttgcttttggcgtttttgtcatgaagtctttgcccatgcctatgtcttaaatggtattgcctaggtttccttctagggtttttaggatttggggttttacatttaagtctttaatccatcttgagttaatttttgtgtaagctgtaagggaggggtccagtttctgttttctgcatatggctagagagttttcccagcaccgtttactgaataggagatcctttccccattgcttgtttttgtcaggtttatcaaagatcagatgtttgtagatgtgtggtattatttctgaggtctttcatggataggaagaatcaatatcgtgaaaatggttatactgcccaaagtaatttatagattcaatgctattcccatcaaactaccatgaccttcttcacagaattaaaaaaaaaactgttttaaatttcatgtggaatcaaagaagaccccgtatagccaagacaattctaagcaaaaagaacaaagctagaggcatcacaccacctgaattcaaactatactacaaggctacagtaaccaaaacagcatggtactggtaccaaaacagacatatagaccaatggagcagaaaagcaaaggatttctaagtcatattccaccacctccatcagggcttccctaagatagagagtatggccaagaccatacttaataaatgtcatggaatgtgtttctcttcataccctcaattgtaagtctttctgaaaggtagcgcgtggtcaatttagatggacaagaagtgctctgcaggagcctttgcaacatttgtgcatgtccttgattttgacaccaccccccgccccccattccagaacagatcgtctcatccttcccttaagccagaggcctatggttctagctttactaggcaaatatatatggtctgtggctataagtcacaatttctcccaagccttgagctgggggaatactgagtctgcccatgtattacatgcagaacatttcatcttattgcagaatgatactttattcttattgcagaatgatattcattattgcagagtgatattctttagtctttattttttatcattataactacatggtgcaaaagaagtatttctcatactttttctcataatgactcaaaattacaaaagcaatctgggcaattaatatgtttttgaagataaataatggcttatgttttctgaagattaagaaaaatctctgtctgaatatagctgggcacagtgtctcaagcgtgtaatcccagcactttggggggtcaaagcagaaggaacacttaagcccaggagttcgaagccagcctgagcaacaaaatgatacctggtctctacaaaaaaaaaaaaaaaaaaatccttggcatggtggcatgtgcttgtggtcccaggcacacaggatgctgaggcaggaggattgcttgagcccagggggccgaaagttgaggctatagtgaaccgtgtttgtgccactgcactccagcttgggcaacacagcaagactctgtctctaggaataaaaaaaaaagaagaaagaaaagaaaaatctctatccgaaaaatgtaggcaccctgtgttaatatgtaaatacaagtgctttatcaaataaaggctagattaattgttttttctcgctcttacttatatcaatactacaagaacttttctgccaaaaaaaaaaatcaaataatagaaaagaatgaatcctagatagagcaggaggggctgagcaggcacagcaaaagttcaaggtggaaatatctttatgcatccaattaaaagtaatttgtgtacattttactcatatatctatatgtacacatacatacatacacagacacacacacatatatatatatatatatatggagagagagagagagagagagagagagaggacaacgaagaggaaactaaagagaataaagggtattaacagcaggtctgtgacttattccctgggggatgtgaagggaataaatgaccttaatagaccacttcataaacatgttaatgacctcccagaccttcttgtttatcttgttaatagtggttaactagaggaaagatacctgcaaatccctatctataaaatgattttagtagggtatacctggcctggctagatagcttattgtaaataaacctggaatgtttggatttatgagtcgtggctggctggagaatagggcatagctacatgaacgtttttctatttttgtaattgacagattataaaatggaaaacttttgagactgaaatgatttcctttcaatgtttctgtgtaaatttttaaaaacgtatctgttaatatgaaaccaaagcacatcataatgggaaataacatggatgttttggaaacgcatgtgtgattatttcaggttccccagggaaataatgttctatctgtgcccagcacttccctataattctttcagtcattaataaagattggtactagataagaatctgagatttgtgtgagtctgatgtgagatccaaatgttatacttacacaatttgtgtttattttagtttaaaaattatctttgccatgagcaagaggggaaaaaaaggaggatgagcgggcctacatatttttccttaacatcttgtcccaagttttaggaaatcacaagtctaagaaaaggccagggtcaggactaggaagtgatataacagttatacatgtctacctttaaaattatataagtaataattaatttttaaccttattttaagcagatcctagaaatagcaagagcctctataacgtcccagctaagaccccaagttttctttcttgtttaactcttgaaatattttgttaattttcagatcccttgtctcctcagttcagctgtaaactctctgacaacgcttgtgccttatgcatctttgcatcatccctagcatgtattatatatctcacatgtaaaaataataataaatacttgatcatttgttttgattttgatgattaagcactggaagctgagctatgatcccaataggtatgcttatttaaagaaaaatagatggcagtccaggcgtggtggctcacacctgtaatcctagcactttgggaggctgaggtgggcaaatcacctgaggtcaggagttcaagaccagcctgtccaagatggtgaaccccgtctctactaaaaatacaaaaattagtctggtgtggtggcagatgcctgtaatccccactactcaggaggctgaggcaggagaatcacttgaaccctggaggcagaggttgcagtgagccgagatcgcaccattgcacttcagccagggcgacagagttgagactccatctccaaagaaaaaaaaaatcacacacaaaaaaatagatggcacggcacagcagcttatgcctgcagtcccaacactttgggaagccgaagcaggaagatcacttgagtccaggagtttgagaccaggctgagcaatatagcaagactccatctagaaataaataaataaataaataatttttaaaaaatagacaataacagataaagaagttccatgttatttttttaaattctagatagccccactggtgttacagtttattaaattacatttggaagcgattttttagcagtccatttattttgtatatttcagtttgttgagagcagatggggttgagtgttgatggggttgattgcctggctagattatgctataaactataaatctttgaaagttactgttttgaagaaagcatctttaagtgaatatattccttcagtagctcctattaccaaaactgttgtgagaatatcttaggaaaacaccttaaaatcctcttctatcaaaactcccaagctttcttcaggagccagcattgttcagtgaatgcatgtaagcctatgtcttaatagagggatccctaacctctggaccatggactggaacagcaggaggtgagtggtgagcaagtgaacattactgcctgagctctgcctcctgtcagatcagtcgtggcattagattatcgtaggtgcacaagccctattgtgaactatgtatgcgagggatctaggttgtgacctctttatgagaaactaatgcctgatgatctgaggtggaacggtttcatctcgaaaccatacccccgcccctgcctcccagtctgtggaaaaattgtcttccagaaaactcatgcctggtgccaaaaaggctggggaccactgtcttaatagatcttgaaaaaagttggagtaaggtaagtggtaaatcctaagacatacattgaggcagagctgcagtggtatccagtagggaagaaaagacttcaagtttagaattcagttatactcaaccagtttttgcctttctctgttaaatattagatatcattaccagacacatacaaaagattttaattgcatgaatgcccgatgttgatacaagagagccgatttttttttcacacatagttttttggggtttttttggtagggagaaacatcatctcatgatatcgttttaaaggtgctttattatcaaggaccttagagctttttctctcactcatatttcatatactcttagtcctcaagccatttctttttactgaaagcactatagagtagcaaaaggcatcattatattgctcagcctcattcatcatcaacaaaattgccaattatattccaagtccttgaatgtattgtttaaaaagatgtataaggtgaaaggaagcagttcaatgttgaggtggaagatgaaacatactgactggtagattcagagcatactaatcttgttttcacttgtgaactggaaaaaattaacatggagggatggagaaaacatgttcaaactacaaagtcattttttctgagaagttatctgactgtaactgtaactgtaactataactcagggtatatcagagggctcaaatgtggaacacttctttaaaattaaaacctaaaagtcctgatgtgtaatagaacgtgtaaaaatagcagcctctgaaggatctgagatgagcagaggaacactgaataatataatctgacagtatgggccatacccttacagtagttgccgtggcctggaaactatagaattaattcagtaaaacatcagaaaaaaagcaacataaatataaaatattttaaattaaaaagactgaataagaacagaaaaaaatcccctagcaaatcaatattgcttggggaagcatgaatcccagaccagcaatattttaatccaaataacttttagttccatcgtgaacacctttatcaccaagttttataaagagtggagtgaagaaaaaaagtacttgaggttgttggaaacacttctcaaagttggtggctttattcagagattcatgcttgactgtaccaacttctgtttaatttatacgtagtactttgtcaatttaggaatttggtttacttgtcctttcctaaatatgtgtattacaaaacaaaaaatagagaaatgataaaataattacaaagatgattaagcaatagtgttggctatagtgaacagattattgccattttatagagtaataatatacctaaggaaatctgtgggaaatttaatttgggatataaaacacagaagtcaggcggagatgaaataataaaccaataggaaattaaatttaggcatgagagtccaaagatgtaaattctatagatgttataaaataatatgtatgcccttacataatttcattactctctgaacttcatttctcagtgaaatatggggaaatgatactgaacagtgcagcagctcttccgcttatgaaccaaccagaagatatataaacaactcttaagggttatacattataaagatataatttagtctggatttttttttaaatttgaaaactaattttatataaaccctaattgggcaattctccattctttgacttgaatattatagtaaatatgttttcccaatttccaagtttcatgtattattttcaaagaaaaaagacaaacttttaaatgtccagctacctgggacttcctctgattatcttttaaggtagttcaaatatatacaatttcaaacaacaacaacaacagcaaaaaatattttgccagacaatatgtcttgtttgtttttaatgttcacaatgtaaagtacacttattgccaaacctcactttcaatggtgttacaaattagccaagtataactagtttgtaaatactaataagaaggttgctgaaattcagccctgaatatttcttttctgcaactccaaagaggaaaatttttgaaatgcaaaccttgacctttatcaaagcctaggtgaagtttgttggaggtgtttggttttttgctggtgctttgttataatgcagtttgaaagtagactagattggcaagacataattggctgctgtgtggagaatgcatttggtggaacacgtgagttaggggtgaggaaatatgaagagccagagtggaagcagggagaccagatagtagtgtgggaagcactggtgttagataagatctagataaaggtagcagtggagatcacaagaggtggttggaatcagggaatatggtttagaaacaatcacaggtcttgctgatgcattggaggtcaggagggacagaaagagggcaatccaggtgtctcctcggctttcagcaggaacaggtacttaaagaggaacaaatttggtagggaaaatcaagttttagtgttccattgcagtacatggtaaccatggctaataataatgtctcatatatttcaaaattgctaaaagaatagatttttaatgttctcaccgcaaaaaataaatgatatgttggtgaggtaatggatacgttaattagcttgatcaactctttctacaatatataccaagatcaaaacatcacatcgtatcccataaatatacaaactattatttgtcaattacaaataaatgaaataaataattttttaaagagatgtcttaaagggtggcttgaagagcttctgtgctccaataatacctgcccattagccatactttgcttccagcaacaacaggaaaacatttaatctaaacaaaaaaaaattgcttgtcaactagatagctactcttccgtgtagaaaccctagagctgcctgggtttagacatgtttaagtttgaggtacttattgggtatctagctgtgcagttcaaaatttggatctgaagctaggggaagacgtcaggacaagagctttaacttttgtaatcatcaatatatacatccttcttagagtcatggggtgggatgccatcatattgggatgagggaggaaaccctgggacttcacaatatcgagctagtttctgttttgcaaaaggcaaatgtattaatgaattcattacattaattaagcaaactatatttattgggggctattgtaccagctattgtaaattttatattttatattatatatatatatatataaaatgctcacaaaataaaggaactaagtcataaatatgcatatgatttacataaaggagctaaaataaggatctctgtttctgtttcaattctttattaaagatctatctaagactataaagacatatataacaaggtacaggaggtaaagagtatattcttaggcatctaaaaatttttcctatgcttttgaaatctgtgtgatttactttcttgaattggcctgtaatataggagtacaatatcattgcagagattaattagtgtgtttgtgaactgttctcaaatgctaaaatgaaagcataaaactataaaatggcatcattattccttaaagaagcatagtttccaagggtgtctctgatcattgtcacagcataaatgaccaatttcacccataattagccaagttagtaagaagttattttttactgggtatattttgtttaacctcagttatatttgtaaaagtagaaactgctacttgttactgctttcagaatttctcacaaatgctaaaatgctttttaattctaatgcacttaaatggtttgattctccttacctaagaaaaacatttatctaaagatatactcttgactgattcattcattgattcatttgtcaatagatgtttatttatcagaatatgtgcaccagatacattgctagatgtaaagggtacatttggtgagcaacatgcatgatacctccaaagtatagccagggaatagataatggaaatgacactaagaatgaatacatattaacacaaaaagagagagagagtcatgtgtcaaggcaatttagcaggagggaacttgtcaatacaagggattaaaaggacagcatgactagggctggaggaggtgaggagaaaactcaaaaagtcctctggctgatgcaaatgaattggatgaggagcctatgaatacaaacgtttgaaggttactgatgaaagccaggtgagagaagatgggatttggaccaagatgatgatagtttggatatggtgagaaaggcatagatttgagagatttttaggaggtaaaaatccttaagatttgaggatagatatcataggaggaagggcgcaaagagaaagcaaaacatgtcaaggaatcacacctagatttctgggcaatgcacagttggtaattctttacagtgagttagggaactctaaagaaagatcagatttagggtggcaatttgattgtaaatgtttggatttcaaatgattggtgacatccaaaaagcactgtaaatagacagatagtgtgcacctaaagaaagaaggaggcgcatctgggttggagtcactaatttacatattacttgtatatagctagtaactgaaaccatgagtgtgaatgagattctgatgctaaattctggaaggtcactttttaaagtgttttgctttttgaagtacaggtgcaatactaaaaataaaaaagactaatttttaaaaattaaattaaaatgaaaagcctggaaagataaacaccaaagttatgatactagttgtagtatgggagagggggcatcagagaggatcggaatttcatcttgaatggtgtattttatttcaaaagaagctttgagcaaagataaaatgttaattctgagcattagaaggaacacatttgtttttttgtactgtggatctttttgtatttcctagaactcttaatctaaatcaaatattgcaaaatatatcactgtaaacaactggttggtcactagctttttaaatactttgtagcaacttggttgcttgtcagaggtcttctttgagtgaagtctttaatttatagttctttatgcttgatcagcataattgcaccaaactgttacttaatctgaaaaatagctgtttcctagagccctacttaatactgaaaacctactgtgtttgtattgcaattgcatttttttttttacttttccccctgcttttcagtttgtataatttctgttaccctatattcaagttcactggttctttccttgtctttgttgaatctacagatgagcccatctaaggtatttttcttttctgttactgcttttaatttctagcatttccatttgattcacttatagtttccagctctatactgaaatatactgaaatatagagctggaaactataagagtgaatcaaatctaatcttgcatattgtcttctaatcttacatattttctatctaatcttgcatattgtctttcttttccctcaagagtctttaaaatattaattatggttattttaaatttcctgtctgatagttccaacaactgttacatatctaagtctggttctgattcttgctttgtctccttagactgtgatttttcttgcttaggcatgctttgtatctcaggggtaaaagtcaggcatcttagatagcgtaatagatactgaggtaaataaacctttgacatggtaatttatcttaatctgactgggaattgggctgtgtttgatgttggtagttgctttggttgtcattgttgagttttgttgctgctgtggccaccagagacttcaaattcctctggtaactttgtttcctcattggaagcttgttagtgtagtggttgagtgtcgggcagaggcattctctaatgtttgaattaatacacagttggcctgggtcttggggatgtggtctttacaattatttctttcccttcctccagaggtagagtaacttcaacctcccattcccttcctggagctgcagtggatatccaccagtgttctcagtctatggccccaaggccctttctcctgcataaggctgaaaaacaacaacaacaacaaacaaacaaaaaaaaacaaacaaaaaaagaacaaaacaaaaccacacatagatgagatctggtgttcccttcccctaaaatgcagtggtatttcctcagtgcctgatatggtttggttctgtgtctccacccaaatgtcatgtcaaattgtaatccccacatgttggaggaggggcctgatgggaggtgaatgaatcatgggggcagatttctccgttgctgtacttgtgatagtgagtgagttctcaagagatctagttatttgagagtatgtaggactttccccttcactgtgtctatcctgctgctgtgtgaagatgtgcttgcttcccctttgccttctgccatgattttaagcttcctgagggctccccagccatgcctcctatacagcctgcagaactgtgagtcaattaaacctctttgctttataaactacccagtcacgggtagttctttatagcaatgtgatgtcttttcctctgaagagaagggtataagcagattcatggtgactagctactgtgacccttccccaatcagcaacacagagggtgttggggaggctttctccagattcttcgcatcctccttgtgaaggcaaggtacagttcctgaaggaagaagcttgcaaaaggttgggactccacctatggcagtagcccccaggatcttcacactctcaggctagctcccacatgtcccccaacaatttaatctccctactagtttatatggcatctgctccagggatccaaatgctcaggcactgcttctggctaaaggccaatctctctccagatttcaggttgttctataatgtcatttctctgatggactgatgaaaagtcattaatttatctgtccagcagttttcttgctacaagtatgggagcaacctctttgcagctctccatctccatctccaagttgaaactggaagtctgagcaatacattttagaaattaatatttgtaagttttccgtgtcataacaaaaataataaatgttcactgtggaaaacatagaaaaagattaaaaatatttaagtgcccatcaccacctagacaactgcaatgaacatgttggtaatgtcttcttccagttttttaaaatctgctgataaaatacaaaagatattgtttatataactttgtatcctaccttttcttgagcaatgcaagtttaaacctaaatacgaagatactctaacttcctactttacatttttgacggcagatgtcagctgtcttcccaagtgcagtacccttggcttaatatcaggtagacaaataaggccaccacaaattcacctttcacctcaataacacaggtaatttgatagttctacagaccctataatattacttgactgaagacccagaatacaagtctttcaaggattactctagaaactatataaagtattggtatcatctcccttcatcatatcttgccaaatccaacaggtttggaacttctgtaggaagatttttgtaacatgaaaaatgcgtgttgcaccttccatatccagcaaatacaccatcggttttttgttggctgcaccaatgacataaaatgatttcactgaatagggggtgacccagaatggaaatgtagagcatcgaaaataaaatcaaccgacgcagtctttgcagcaaaccatgtggaaacaaatttaaatatggaacatactctttccaactcatcttcagatgttgctttaaaatttgtgcaggtgaaaaaaaaatctttattttaaggtaactcaatcttttaccattggagagaatagaattatttttgtttcctcttgtatattcccagttgtttaaatgttctctgtttccttgtgtggacacataaatccaaatatatctaatatcaaggtatttaccatatgcagcactttttcctcagatagttattttttgaaatattcaaatagcttacctgtatcatcccccccatccttttttttttttttttttttttttaagacggagtcttcctctgtcaccaggctggagtgcagtggtgcgatctcggctcactgcaacctccacctcccaggttcaagcgattctcctgcctcagcctcccaagtagctgggactacagttgcatgccaccatacccagctaatttttgtatttttagtagagacagggtttcaccaatttggccaggatggtcttgatctcttgacctcatgatccacccacctcagcgtcccaaagtgctgggattacaggcgtgagccatcacacccagcctaccctattttctaaacgaacaattagttgacttttcttcagttcttactcagaaatatctgaccctaggttccaacttttgttttgctctttgcagttagtttttatgtgtactgttagggagatgtgctttttttttaccttcaaatttaaaagagagagttttcaattccttttaagtcaaaatacaactgttctactctaaagctttctttaaaaaaagaaaagtaccaaatcctcatccgtagtaattaattttgacagtgtaggctcagtagtgattcacaaacctgtattttgtgcatcagcattccttattattctaattaaagtggaacattgtgccctcgctaatcattaatgggttttcattttgtaaatgacatttgcagaagttaaaacagcgagttcatgtgaagtccacaggcaacggtgttgaaattagcatcaccatagcaacagtcttccatcattagcattcagggcaacaggaggtgttttgttgtgttttgtttcccaaaaaaagaaaaagaaaaaaacttcaaaggtaaagcctacagaaactctctcagaagatatttatgttccttgtgtgtatgtgtactgtactagacctctaagtctacatagaattttttttaaaaattgcaatgtggatcatctcctttccagatttgtgttttgcctagtatactagctaaatttcatgatctttctccagctgtacacgtctgacctgctgagcagcatttactcattgccaacctgctgctcaccaatagggtttcctacgtggatgaagagagtctgtattcatgaaaatatttggttcaatctaaaagtattatgtgtattcatgagtttttaatttaattcatggaaaatagatttatgctgttagatcctctggtgaactcatttagtcatgttgtagatataggtcaatgattattctcattcatgtttagacggaattaaagaggagtcaaatagagaacaatattatcttaactgagtctctggcagtggtattaccactattactctgtatgtgtgtgtgtgtatgtgtgtgtgtgtgtgtgtgtatgtgtgtgtgtgtgtgtgtttgaattctaatattctgggaaactttaaaagtggcatatctagcacttatgtttttctcagtactaaaatgcataaaagagcaccatattgacctaccagctgcttctaaatcacaccagtagtaggtaattatgaaattcaaatgaagtttaattttcatttattatacaaaaatgtcatagctcaaacccagaagtgttacccccaagcttggatatagacaggtatgtgtgtacattttacttttcaagatgaatcatagcagtcttctccattacatgtaaggactagaagttgtacattccactcaggtacctaaaggcaagcctgtgctagcccacactaacaaagcaaaatgaagcaaaggatctatctggctttcaatcagggatgcatctatgctatcatcagctctgtcacataataaatgagtctatagataacttgaactactcagccaatgggctgtaacccagtgattctgtggtattgaaaggcagcaacccccagaagccacatgtctcagtgtgcactccaggactgtaggcccatagaacttgtatgtatgcacacatgcatatgcattccccacttttctaatggcgatccaatctaggcctaatccacagctagtccagaaaagaacttttttaggttttctgtctgccatcactttgttgagaggcagtacaagccaagcaggtgtctgtatttataatatgcacaatgttaggataactcaaactcataagggaaagattaatggctgactactatgaaaaccgcttctagccttgtgataccagcacctactatcttcctttttctcttatatgatgaaaagatttcaatgttggcttttcattctgatagaatgtgcaagccaaaatctaaataaagtccagtggcaatgatccccttaaacattatatctttcttctcgatatgctgatgttttcccttataaaaatctatgtaagtttcaagatttatatgacagacaaaccacacaaacaggaggtccctcacattcactactagtcacttgctctatcactctgggaatagcggtcttcagattgcatctctactctacctcttgctcttttcaacccctctcctcttttttagaccatacagggcatcagacaaggtttagtttaccactaaactttgggatttggaagatggtgtataaactgatacaggtagtccactcacagatgtagtatataattacagacttgagttttcaggggctcttctccagtttcctgtcaatcaatttccctggctgagacattagcatttgtcagtgaccatgcttactatatacatacacaattgtgtatacacaattgtaaaattaaatacgggctttagaagagattattttttcttaagagtaggttactctataaatgccaaagcatgtgttatgacatagaaattcaaatgactaagaatagctaattgtttagaaacatcttacttgatgtctattgttccaaaatttgatccaatttagagtggtaccaatccatggtgtagaatataaaagctaaaggataacaaaaatcctaggaatctcatgccagtaagaaagttctaccagtcagatgagatgttgagagcatttatgacttggcatcaggaatattataagtaaaattcatgtgagcagtaattgcagctatgaaccatgttatttgttcccacttgtccaactgtaattctttcacttagctcagagtagttctttgtaacattagggcccactcatctgcctttaggtagggttttaaaagatgcctagaaaatagttctgtgctagaaatcagagactcttgacctactgtaaagggagcagtaagcacgtttcctcaggagaatctttctacatactgcagattcccataaaaatctttgtgacaaaattgcctttactgaaaccatcatccattggattaaaaaatagcttaccattagctttttgaaaatagaaaacgttgagccttttcaatgatactttcaatagtttttcacaactatgagtcctcaagctatcagtcttatttttagataccatacttataagatagttatagaatttatagagtatggtttaaaagactattcaattatagagcaatcattcagtttattcccatggcagaagtaaatggaaaccactccagatcaacaagaatctactctcttctgattcagaaaagagatttcctatcttttcatgaataatccatgttcaatgtttaacacctcaggaagattttcttaatagcttcttctggtcataaatccttggtctgtcatcagggacatattgaagagttagttaccaaagttcttaatgtctcccattgtaaaaaaaaaaaaaaaaaaaagtcactttttggattgtttctttcatagagtccatgcttctgtacgcttaatactttagcttttgacttcaagctttaggtaatgcaaatgaagctattacatcaccaaagttaaatttttcttgtaagtatattctcaacattcacaattgagagctgcctcttctttggctggtataaggttttaatttattgtagcactttcaccctagaatggcaaaaaatgttgaaatcaattccatatatcaccaatacaaagtactaagtcaaggccgggtgtggtggctacgcctgtaatgcaagcactttgggaggccaaggcgggcagatcacttgatgtcaggagttcgagaccagcctgaccaacatggtgaaaccccatctctactaaaaatacaaacattagccaggcgttcatagcgagcgcttgtaatcccagctacttgggaggctgaggcaggagaatcgcttggacttgggaggtggaggttgcagtgagccaagatcatgccattgcactctagcctgggtgacagagcgagtctcaacaaacaaacaaacaaaaatattgaattgtacaccttaaatgggcgaatcgtatggtatgtatactaaatgtcaataaagctgttatatgaaaaaaaaatgctaacacacacattctgaaagtatattaaaagcaaacctacggccgggcgcggtggctcacacctgtaatcccagcactttgtgaggccgaggtgggcggatcacaaggtcgggagatcgagatcatcctggctaacacggtgaaacccagtctctactaaaaatacaaaaaattagccaggtgtggtggtggacgcctgtagtcccagatactcgggaggctgaggcaggagaatggcgtgaacccggggctggagcttgcagtgagccgagatcgcgctactgcactacagcctgggcaacagagtgagactccatctcaaaagaaaaaataaaaataaaaaagcaaacctacaatgtctcttacaaacacaggcaactattcaattccgagtttacactactgaaacacacatgaatatgacactaagagaatcacgtggatctgcactcttcaatcaacactacgtctctgagcacaagaattttacatctgatttccatttggggaaatagattcagaatgccataaaccagatacttcttgccttcctttagtggtcatttctgccattatcatttaagggaatggatctccttctcccaaaactgttaccctaagattacaagcttgtcctttaacttatctctgaaagcacacctctataacgggtcatcagtattcagtcagctaattagactgcagaagtacgtttactcaaatgtgaggagataaaattgtgaaatgtaagaggaagaaagaatgtcaaagataatccaacccaaactcttcatcttacagataggaaaatggaagtccaaaaggggaaagtaattttagtaacatggctaaactggtctagaaaaccagatcttctgatacctgatcccatggtctttctaatgccatggatgttcgggtagaggatatattcaggtagataacttatagatagccccatgtgtttgtatagcactttatcgaacactttcacctctattatcacacttgattcttacaatatcccatggaatgtttgagtatcatatatgattattcttattcccacagacttggaaactgaggctttgagatgtctggatctatcttagatcatttgctatggactagaatctgggactaagttgcttttgtctaagctgtgtgtttgttctgttgtgccgtattgttaattcatttctgttggtaaacaacacaaaggaaaaacttctataattatgtttctttttcatcctcaggtcatctatcctactttttatctaagctttggaaaatattatgtgctttccttttttttgtattttcttttcgtagagatggcagcagggggtagtctcaccatgttgcccaggctgacctcgaactccttggctcaagcgatcctcctgccttggcatcccaaagtgctgggattacaggcgtgagccaccacacctggcctattatgtcctttctttagcttgctcgtttaaccatttgtttggcagggggagtcagaactgtgttttacttagtcgattaactgataggacaatttaatatctaccctgcactggcagtaacccccatagccccgctctgtgtctcattctgtgccctgaacaaccttgtcttaaaaacattttaaaagcagcaagtatggggagatttcttatctccatataatacagaagcaagtgtagagtatggctacggaaaacaaccagcaggtgaggctgtgacataacaattttaacccaagcctcactgccacattgaggtatccttgttcaataaatagatcagaaaatatggtgtagtttttccctaacgctgtctaaacagcaacaacaaaaaatcattacccatagtatttcagtaatgtgttgtattgaatgcattgttttcgagggcgttttcaaaaaataagttgattgaatctcttttttttgcttgaagaatgacccacattcagaaagtatacagatgaaacatgttcagctcaatgcaattatcacaaaatgaatacacctatgttcgccatctaggacagtaaataaaacattatcagtagccctaaaccagattacacacacacacacacacacacacacacacacacacacacactaaaccagactacacacacacacacacacacacacacacaccgggttgggggagtggtgagagagagagagagaaagcgaatattatgttaacagttggggagtctaagtgaatggtttatgggtgttcttttaacatttcaattggtttaaaattttcaaaatgaaaagcttgaggagaaacatagaatataaccactacctcagaaatcaccaccctacctcacccacattccctctcccaatcactattcctccctcatcttaaaggtaactgctactctgccttataacactatggttgagttttgcctgtttatttgaactctataaaaatggaattgtacagtatataaccttttgtatctaggactcaacattgtgtttatgagattaactcatgttgttgcatgaatctgtcatacattttcattgcaatttgatatcccatttaaaatgtatactataatttatccattctattgttggggaacattttggttctttccagtttgaagacattatgaataaggcctcctatgaacattctttaatgcgttttttggcacacacgtgtgtacaactgtgtttggtatatactttgcagtaaaattgcctatgttgagggtaggcatatgctgagctttagtagatactcctggttttccaaagtggttgtaccagtttacaccatcattagcagtatatgaaagttctagtagctccacatctcaacaatacttgatacttgttagtctttaaaattttcgccattgcagtgagtgtgtgagtagaatctcattgttattttaatttgcaattgtctgattacttatgaggttgaatatttttacgtgtatttattgaccattttggatatcctgttgtgtgaagtatctattcagtctcttgcctattttttttattgattcatccttctttttcttattgatctgtaggagttttttttacatattctagtttgtagccctttgtaaattgtatgtgttgcaaatatcttctcccattttatagctttccttttaattaaattgtttttttgattgatagttcttaactttaatatagtccaatatgtaaatttttccttagggttaattcttttgtgtcctctttaagaaatctttcctaatacaagataatgaatgtatcctcttttattatcttctagaaacttactattttttaacttttccatttagatatatagtacacctggaattgaccttttgtgtaatatgtgagatagagattgagttttatttttcataatatggatatctagttggcccagtacttgatgctaaacattcatttagaattcatttgatagtatttcctttagagttattgcatctgtgtttattagttatattggtctgccattcttgtcaaggtttggtatgtggattattctggtttcataaaggcaagtagggaagcattgcctcttctagtctctggaagagtttctttaagattggtatttctgccagtgatatgatttggccttggaattttcctagtgggaaaatttataattacagtgtttatttcttaaatagtacagggctattccaattttctatttcttcttttgtcagtgtcagttgacttaaagcacactaagatactctaagattgctatggtcagcctttgctggtctaaaccagaggttgcaaactgaaatgccaacagaggggctagcctgctactgtaactgggcaaggctagcgaagcgtaagttaatgggagctggtagggactatagaatacatgtgccgttatagaatggtggctccggaaagttattgtcatgcaagaataggagcccagcatggacaaatcattccttttaaatgagaagtcagaaggttggattattctgtaaaatatctctgaatatttaaatgttgagtaattcagattaaaaaaaaaaaaactgtgtgggctaatcaaaacatttgtgcatgccaaatttagcccaaagtctgctagtttgcaacttgtactttcaactaatgaaaagcgtaatagcacagatataattccattttcaaataatataattcatttatagttgacatttatttaatttacacttaaatatgaatttgtcatttaatttaccatattaaaaaagtttagattttaagacatccaagtctgcaaataactagaatattttcatttactctcatgtttgtgtacttatttttccttaaatgttattttcatgatatacttagtgtcttgtggacattccaaaaaactgatttgacttaaattgtcctcactccaagctttaaaattgcttagttcatagcctaccttgcctaaagcaaacctggtagtctcatttcaagttactggattttttgtttgtttgtttgtttgcttttgccttgtttcttttcaaggttatatagagtgaaggaatatcagacttcttttaatttttgcagggaattcagattgctgtggattaagatcctatatataagatgcttaggatagaggcatcatgaatgaaaaattattcatatgaacacactttttagagtattatttttattcattcagcaaataatcatagctgccatactaggcaggtagggaccatgaagactactgtccttgtagtctaaagtcttgtagactaataagatatgtataactgttaaatagtacactgaaaatacaaccttaaacaatcaaaatatttgcaaattgtatttagttgacatgattgcataattgtatttatgtgacaattatatttgttattcacatatttagggagtcaatatgtacttaaggtaatctttgagctattttcaggatgaggtattagctcattactattaatactaccatcaccaaatgcattacctacttatctgcatttccaggaaaaattcaggaaattaggatttttaaaataataaaataatagtaaataagactgggcatggtggctcatgcctgtagtcctagcactttgggaggccgaggcgggtagattgcttgatgccaggagttcaagaccagcctggccaacatggctaaaccccatctctactaaaaatataaaaatcagccaggcatggtggcgtgcacctgtaatcccagctactcgggaggctgaggcatgagaattgcttgaacccaggaggcggaggttgcagtgagcagagatcatgccactgcactccagcctgggcgacagagtgagactctgtctcaaataataataataataataataataataataataataaacagaataataacctaagtgactatatttgatatatagttaagtgatgtttttgtagactttactaaactaaaaaataaattagcagttatttaattttctagtttataaagtacctacttacataaagttgcatatattacttcatttaattttaaaagaatatcgtaaaatatgtaggatagatttccattttatagtcaacaatacttattatttcaatacattatgtgattttttttcccccagtatcacagtgttagagcccaggttcaaaccagcattttctaactgtaagtctggaagtctgtctgcttactctatgtaagatgccttatgaagttcatagaggagacagctcagtggattcaggcctggtcttatattttgctgttcatcttgttttaagtgttatgttaagcaaataaaacataactttaaacattctgtttacttttaaaatttgatttagagctaacaaaaattagaatttgtactccatttacaacgaacagaacaaccaaataagcaaaattgtatttgcgttgtcaattacaataaataattataatggtatatcagagtgttaaattttgatttttttttttttgagatggattttattttattttttattttttttttttttgctctgtcacccaggctggagtgcagtggactgcaacctccacctgctgggttcaagtgattctcccgcctcagcctctcgagtggctgggattacaggcacccgccatcatgcccagctaatttttgtatttttatagagatagagtttcaccatgttggccaggttggtctcaaactcctggccttagatgatccacccgcctcgacctcccaacgtgccaggattacagatgtgagccgccacacctagactaaaattttatgttcttatatttctttaaggaaagcaaaaatgttgacagagagggttaatactagttatatatacaaaaaacctaaaaataagattttggattattctattatatgattattcatttattgaaaatcataaactaattgaatgactgagagcagcactaatgtgattactttggtaggaatctgtcctccaaagttgtcagttgtcagttattcttagcattttgaactgaagtctatgtaattaagtcacctgttgtttctgacaaaatgagcaaacacacataaaatctcttggttcgtcttcatgtctctgtggcagagaactgaccacattattcagttcctttgtcctttttagacaaaagccacctctacatggccctataagtcttcaattcaaggactatagccgttatcttaatgggattgtacttggttatctgataaattgtcgggaacatacccacattgcttcctttacctgacataaaatttagtcagctggggctcaacgattgaccagctttatcttgcacgtagtgaagggaaggactttcttactcctggatgtgcctaaatttaagcctttgaaaaagattgaagataccaattggcctacctgccctaagtagatgcttcccacagacttaactggtgaagtgcttgtctaaggtagacagaattttttctttagagaggagcaaacaaaaacccaaaaatactggcgtgttcttttgatgttctatttcccaattgatttccgggttcacactactccacaacatcttactgtcccattgcatcttaaccctctctcctctcccgcccccactttttttttgtctgtttcttctgcttccaccgttgcttctgctctgaagcaatcattttctctcccttcaaccaagggtggaattggcacacagtcaattggcttgggagactgcttactgatctgtcttttttgaacactggaatcttgacactggttatcattttgaggacagcctggtttggatatttatctattaagaggaatccttaattggtgtctttgactggagtatttgaaggagtctttaattgggaggttttaaggcaccagaaaagattcattaggaatgactgacctcatgttatataaatgagaaatatttaccatttgctgtacacgtaattgaagcatgattatacataaaagcatataattaaaaaatgtaaataaatacctaaataaataaatgcctataactagcatggcaaaggattctgatatcagctttcaatctcttttagtagagactggacaaatcagaaaaagaggatttatacctgtcctcctatagattatgctttcttctcccatcatccagttttaattgaatctcctcattgtgctttctttcaatcttgagctgcacaagttgttttctcctgtcagagcttttaatacacattgacaagaattattagtctctatctgcagttgttccaagtgcaggtttgaaataaggagtcgtcatcaatgtgctaacgcgtgctacttttggtatttatacaaagtgcctgctgccagttacttgccacttagaatgtgtttttcttttcctctcttgcgttgtgggagtagaaggattctctgtttcttttggcagacagagaaattttcagattggggtctaatgaaagaaataggttccattatacagatgtacagatgttctaaggtcacgatacctcctataatattcttatgtgaaacctcctctttatgttcaacctgtgtacgttacacttatacatagcaggcatagtagccatcaatattagttactttaaaacccaggcctcctaggctgtggtttgtactaaaacatcatattcaaataaaagcattccaatacaaagtggagaaacagggacaggcatggtggcttaagcctgtaatcccaacaggctttgggaggccgaggagggcagatcgcttaatcccaggaggtttagaccagcctggccaacatggcgaaacctgtctctactaaaaatacaaaacttagccgggcatggcggcacatgcctgtaatcccagctgtaatcccaggctgagttatgagaatcacttgaacatgggaggcggaggttgcagtgagccgagatcacgccgctgcactccagctttggtaagcctcggtaacagagtgagactctgtctcaaaaaaaagaaagaaaaaacgtgtagaaagaaagagaggatctgattaagctcacaggaacattgcttctcaaattttaatgtgcatacaaattgtctgggaatcttgttaaaatccagattatgagccagtgggtctaaaatgagacatgatgttctgcatttctaacaggtgatgctaatgctgctaatctgtggaccaaccacactttgagaaggaaggaagtagactattatatttactcattcacttgttccatgataactcttaaaacagactggtgactttaatacaattcagagcaccaaataaagattgtcatatgccttatttttaacctatcgtcttatatcaaaattatctgataaacttcccaagtgtgcatatatattgtcattttaaataggtttcaataaaatgaagattcgtgagtaagaatataggaataaatgacattaaaatctttctttataatttatatttctactttcttttgaaagaatttgtagtggcttaaacataagagcacaagatgagccagtgacaggaaaaaccaagtgcatctgacatcttagcttattaggtctagaagacaacctccattacttggtagcaagcggctgggaatattggtgttcaaagctgtgctttcctgaaggcaaaaacagcatcaaaatatgaaaagctttttacttctggcatgagtgataaagatgccgatctgagaagcaggtgaaaaaacttagcttatgcttctaaaggctaattttatataagtgttcttgtccagctgttcttggtaagtccagctgctagttgaacaggacaggtggtaatccctgttcagtggctcattatcacccagaggctttgatctggctaatacataatcaatcagcttctgaatattaatattcttcctattttcatttcacttgttttacctaaatttattttccaaagttccagtatgtttttgttttttaataagatttttgatcatttatttattttgacataactaggctcatgatatgccagctggagtttattacacccctgaatcacaaactttttttcttccctctttatctccttacaagatccaaattgcaaaacctaaggataaagttctaattttggaagcacaaaagactgaaactattttagaggagagcgttaatgaaaatcaatatctaaaatcctcattttaagactgtgaaccctatagtctatacttctagtgtcttcagagttgtgatatgcatacattaaggactaagaaacatttttttaaatagtcagatttgggagcattagatatgtttgtagagggaaaaatcaatttatgataaaaattactgacaatggtttaatttgtattagttttgcccacttccctgttatctcagaatggcacctccatggacagtggaatggtcctaacagcctaaatatggtaagctttaaaaacagatggcttggggccattctgcttattatatcattgctttcaatagcataactgttcttctccaatggccctctttgttgtttgcttcattactggcacatttctttaatatgtaatctataacattaacatgaaaatggctctcaaatactattactttctccatctgtgacccagtactgtttatcatcatctaatgatcattcttattgcagatggccctctttaaatgtttcagaatagcattttaaagacattgagggtgcttcctacgtacattggcagactgaatgttttaatatcgaaaatctcggtctacacgatgtgtgataaatgactggagatgcaaggcaccagtcagttccaaagcaaggtgtaagagggacaggaggagagtgataaaaaagaatacatactttgcgtgtgtgggtgtgggtgtgtgtgtgtgtgtgtgtgtgtgtgtgtgtgtgtgtttaagccattagatttatctttaaggaagcattatctttaaggaaagttggagtaggaagaacaaaatttaatcaaaagaaacagttcttggccagaggaggtggctaatgccggttatccgaacactttgggaggctgaggtgggagcattgcttgaggccagcagttcaagacctgcctagtcaaggtagcgagacaccccacctctgccaaaaaaaagaagaagaagaagaagaagaagaagaagaagaagaagaagaagaagaaacagttcgttattgcagttcttaaagaaggagtttgtgtttcctttctgatcattcaccatggcagtgatacaaaggagtgatatcaaattgataaatgagttccctaaggctcaacatatactaaatgcctatgctgaacttccaggtttcaagtccctagagcctctctgtctgaagatcctatcaccaaggattctttgtcttcatctagtactttctttctcctctctctattctttcctcatttgcggatgcttgctggggcctgtcaatcaaacatagatgatccctgacttacaatggttggatttaggatttttttacttgataatgctgcaaaagtgatacacattcagtagaaaccatacttcaggtatccacacaacccctctgtttttcactttcagtacagtattcaataaattacatgagctattcaatgctttagtataaaataggctttgtgttagatgattttgcccaactgtaggctaacgtaagtgttctgagtaagtttaaggtaggctaggctgagctatgatgttgagtagattaggtatgttaaatgcatttttgacttagaatattttcaacttatgatgagtttattggtacataacctcattgtaagttgaagagcatctgtatctgggttggagcagaagtattgctagtaatgcatccatgagtcaactgtttgcttaattggtatgctaccacacatgtcttgagcttgttcatcccatggcttgccattgtgttggaaaggaaggtgttacagcattgccgttaataacatttctaaatgggaccaaaaacagtattttctttatctgctagatctttttattttcttctttctctgtatacgtgagctgttcccaaaatttagcacacatgttttatgattctcaacataacgtttatggtccttaacattaatctcatattagaaaataaatcatgatgaaggtgaaatatagaccaagcaggggcagttatgaggaccaaatcgtcagtataaaacttttataattaatattttcatgaattgatagcacttgcttcagagagctaaactcagaaaaaagagaaatattctaacctgaaaatatatttttaaaaactcataatttaaggtagggggcaagtagatttggccatattttgggctttcttcaccaattcagacacgataatgactacatttgtatcctagatttaaatttgctagatggaaaagaaacacataaatataaaccccatctgcgcaaacaaacataaccattcacattcttatgcaggattctggggtaggggagggctttttttgtattataacatagcatgttaatttttaagataaaatggaaatatttttgtgcttttgttaatttttatgttaaaaatgacattttaggcacctaatcaaattctctgagttctttcactaaagaattttgcctaatatttgattaaattcattattattaaagatcaatggaatttctttcagtttgaaaagttgaaaaaatgagttgacacattgattcatagaaaaagttatgaaatttgagaaaaattattgaaccaattttatttaaaatacatatagatattatgtgtatctgccttcattttcaggataatgaatgtcagtgttaaatgtggaaacattctaaaattggaaatcagactccacttggttcaaagaacaccttattttagataagccttttaaaataatgattgaaatccagtcaatccataccctcacacataatcctcatgcatgatctttgtttttccctatctctcctctaaatgtcctttacaaagatgagaaatgttcttcccaacacaaaattcctttgattgtatattagaaagaactgacactttgcagcaaggtttaggaaaagctaacgtaagtagagcttctctgaaaactgttttaccaaaacatactggatttactgctgttaaataatggatttttttttttttactatttatatttgctcctcattgaaacttgtaaatgactttattagtcttaggcaacacatttcattttgcattggataaagatgcttcttcagtaaagtgttcatttatagcattgagaatcttgaaatataaccggtgtcatcaaagggtaggaaggtagaggcacagagaagtgattaatcacttttccctccaatgaatgatctactgtcaagttcaataatcatatttcatctataaagagcactttgagcaaagcctgttttgcacacgtcattacatttgattacaattaagtataaatatatgcctattatttagctctagttaaaatctgcaaaaatatagaaggcttgtgggtgatgtaaattggagatttgcataggtttagggtacaatattagaaaacactgtagttttatttttgctttatgactaaaaggcactagctatgttatctcgtttgttcaccaaactaaaaaacaacagctaaaaagcaatgtaacaaatttcctctaaccttcttaacccatccactgctgtcgcatgactctcacaaatcagaaataaagaaccatttctctactgaaggtcatcaactcatttgagggccatagatcagtaaaaaataacttagtctgagacattcaaatcacttgctttttaggtaaatattttggcttttaaaatgacacaaatctgaccaaaatgttactcagctttatgggaacgggattcttttctagataatcttagggacgatcttaactcatattgtttttgttcagagactaggtctaatttgttagaagtgctgccatgggatctcattctactcaacaggagtgcattcttcttatccagtatccactaaaagtcactcctcctcccatgaaaagagttgccagtggaaaactcagagaaaacatgggaagggattggtgatgtcatataaggagattagaaaacatttttttaacgtttaaaaagtaaagagatgaattttaaaatttacaaaccaataagtttgatgttgatgagcaacaaaatcctggaaaatgacatcgtactgattattaatgattacataggataacatgctgctgggaatcagcgtgatactctcaaaatctgccatgtcacatgcacctcattttcattttttttatggctgcttgatggttagatgagaagactgttagagacagcataacttaggattttacaccacatttttcaagttctcttttgagaatattgggtacaagataaagaacagtggggctggctaataggctgaatttgaagctgattaaataatgacatctaaagaatgtcaattaatagatctagatcaacacaaaatagagtctctgtcgttggccctgcctttgcacatggctgtttcttcttcagtcatctcttaagctcaactcagccctctgcctgaagacctcatttggccagttttgcccattcattactactgtgaactctcttttgttatttttttcctgttttattctgagaatggattgagctagatatgtggaagttatgggaaagcatattttaactaaatattaaagaaacttttgtaatcgagctctccaaaaaataaaatccgccactttgaaaagcattaaactccctgtacagtagattttcaagactgaaatgactgtctcacccctaaaggcaatttctgtattggatgagaggatataattcattaacctttaaggtcacttgtgaatctaatgttttgatattttcggaattaatcagaagggaactgacagcatgacctgaatctgtcctatatttatgtaaacatcctgtgtgatgcacctcattctttgtgcagttgtatgcatttttgaatgttaaatttgattttagggcaaacgcttttttaaaaaaattttaaaataaactttattaaataaaaatttacacacagtaaactgcctccatttaaagtggttcagcgatttttggcagatgtgtacttgtgaaaccaccactgcagtcaaatgacagaacgttcttactcccccaaaagcctccttgtgcccctttgcaggtcatttttcctttcacccctgattctaggcaaccactgatcgtctttctctcactgtgtattactttgcattttcaagaattttctataaatagaatcatacagtatttttgtatgtatctggtctcttatattcagcataatgattttgtttccagcttgaggatattatgaataagactgctaaaaattgtatacttgtttttctaaataccccttataaaatcttacttttgagaagcatattactaaaataacttcccaggttatatgtgtatttgttctttctgttcatttcagcattatcttattaacaagcaactggaggacatgcaccaaggataaattgactaggtgctaactgaatttgtgagaaaggcctagtttctaacgttctttcttgggagcagatgtgtaacagctacttttgctgtataacagaccaaccccaaaacttactggcttaacactgaggtcagcaaacattttctgtaaaggacaacatagtaaacactataggctttgtggagcactttgcatctttgttgcacattctttttctttttacaactctaaaaatgtagtcatacttagctgagaggctgtacagaagcaggccatagaccaaatttgaacaatagttcataaactctataacacaatggccagccatttacttagctcactatttgatgggtggattgggccatttatgtggtgtgaccagttgtactactgtttgccaggcatgcttatgcatctgtagtcagctggcagctggataagctatcgtgacctgactcatatgtctgatggttgacaggctgtcatctaggaacagatgcaactaggtttgtgtgtatctcatcatccaacatgctagttcaggctagttcacatggaaacttctcaggtttctgcttgtgtcatgtttggtagtgtccattagccgaagcaagtcatgtcatagggccatcccagatgtaaggagtggggaaagactccacctgttggtgggaagagatacaaaggcacactgcaagagctggacaccaaggagagggctagaacttttggccatgttgcaagatatcacaaaatattcaagaaaagttacaggaaggttcctctgtggactaaattctcttctgaatttagatgtaggtaaaatggagtgtgctgttaaaattcatgctttgtgagtaatcattgctaggctaaactgtttgtggcttcacagccaatggtagacatacagcatccataatctagtgcttttaaaaatataagaaatactgattacaaacatagttaaccacttattagtactgggaatttaatgaaagctgctgtgattaaatactgaaaaaagaaagattgtgggtttccttctggtaactttcaaagctggtcactcttttgaaaggaattttattcttaaagctgttatttttactcataatatgcttaatacccccatggctgcagactgtctaaaatgttcctacaattatatgagaatacttttaaaaatcatgataattatcagtcttcatggacacttattcagattaatttccccaagcacttaataggatgaatttataagcattaaatagaatggggaccatccagccctaaaatgtgaccattctgtcaggcacacacttgccaatttgttggcgtggacctgagcacactagcaaggactttgaattaggtctcactgcaagatggaagcagaagggcatttctcagtttatgttttgaagtgttttgttcagacaggcaacgtgcagttgtgtatagtagtgtgagctacctgttactccccttaacaatacttttagcagcaatgtttttcctcctgcaatgtgacaatatcaccatgccatttggaagaaaacaaaaaggctgagtgattcctggtatactcccaaacagccacccaaacgaacagctggcagagaagacaccccctaaaacttggagcagattctcagcccctgcagcatctcatgtggttagaacttcagacttgatgaacgcctccccaacttgctccccctcctgaatcttttaatcctcctccagtctcttgtaatgttccagcccttaccagggaataagactgcaaactgtcttccgtcaacttctttccaaatcctagtctagagaaattataatgatgcatgattgtccagtgggcatgtatagtttgtccatttctttatgtagtaaagcctgtagctttcatcttttttgccaatccactataaaaattaattttatatgtcatcctggtacacacacacacgcacacacgcatctatatctgtaaatctttttctgtctattcatgcttgtatgattgaaagaaaagtttcacaaaacattacttacccataccaaatagtacactttcatattttttttttttttttaatttcaacttctattttagatacaggaggtacatgtacaggtttgttacatgggaacattgcatgatgctaaggtgtggggctcatgacctgttacccagattgtgagcatagtacccaataggtagttttataacccattttccccactccaacctctacactgtcatattttctattcttttctgtttcattaagaacaatactggtaatgatccactatatagatttcatgacgtactaagggttcatgacctgcagtttgaaaaacactgtagttagttttatctccacctcaggccaggtcatcagaaagctgcattcttagaccactttgccttggcccccataagattgcctcaactcaggtgtacctcggcatcatgttcctggcttatgtcgaggggcactgaaaactgctgaagggatttttctgaaagtcgacaccatgcagtgtctcccaccttagatcccatgcagatctgtttattcaatctaagtcattccagacttggattttcctttgtttcacttacactctttcctccttatcaataatccaaataataaaatcgatcatatttccttttatattttttcttttgctttgacatctacaaaggccacaaccaaattatacccaccttttaaaacacttttttactgaaatatattaggcatgtagaaaataagggagatgctggttaaaggatatgaaacttcggttaggaggaataagttcaagagctctattgtacaccatggtgactataggtaatgaaaatctagtatagtcttgaaaattgctaagagagtagatttaagtattatcaccataagaaatgataagtatatgaggtaatgcatatgttacttagcttggtttagccattccacagtgtatacatatttcaaaacatgttatacatgataaagatatacaatttttatttgtcaattaaaaaaaaagaaaaaatggcttaaacttatacagttcagtgaattttcacaatctgaacacactcatttaaccagcatccaaataaagaaacagaacattaccaacctttagaaggccctttgtgtgcccttctgatagttacctgtcctccaagggtaaccacaatcttgattttgaacaccattaaatattctggcctgttcttgtcctttatataaatgaaattgcacagcatgtactcttttgtgtctgacttctttaaacctggattcatccatgctgttgtatgaagtggtggattgttcattctaattgctatgtaatatcccattgtgtcaatatcctgcagtatattatatactctactgtggatgggcatttggtagaaaaaaatgatgttataaacattctaagacatgccatttgatgaatatatgtatgcattcctttgaggactatatcaaggggtagaatttctgggttatagggtctgtgtgtgttcagcttctgtacattcttccaaacagttttccaatgtggttgtaccagtttgcactcctactaacagagcatgagagttgtagttgctccacatcctttctaaccctgtgttgtttgtcttgctcattctggtgggtatgcatagcaaaattttcataaccacatcatgcactgtgatcttcaaagctgtgttctggctgggcatggtggctcacacctgtaatccctacactttgggaggccaaggtgggctgatcactagaggtcaggagttcgacaccagcccggccaacatggtgaaaccccgtctctaccaaaaatacaaaaaaattagccgggcgtggtggcaggcacctgtaatcccagctacttgggaggctgaggcacgagaattgcttgaagctgggaggcagagtttgcagtgagccgagatcgtgccactgctctccgacctgggtgacagagtgagactccgtctcaaaacaaaaaacaaaaaacaaatctgtgttctaaattttcctcgcttcttaaagttttatgctatttatatttccttagtgctgggttttattaatttttaagagttatacattgttataagttgccctaaagcctttacagaacaatgcacagtataaatatgtacatagtatatacacaaatatgaatccatgaatgcacagctaatagggccattatcaaaaatcctacacttttccttttcctctagccctcacattcaattggctcaaaagtagcattgattttattctataacctgtcatgaattcagcctctccacaaattcccagtgctcctttcttagttcagactttcatccactcttaactgggctgttgtcatcatctacttggcatacatttccattctgatccctaccctcttttccacccttgtttcttcccacctcaaatttaattctattttaaaaagaaagatattcaaaagtacaggtggtgccaattttttcttctctatccatcatatgcaaagaggcttccaattctttgtcgacctgtttctaagggatgagagtaggtcaagctgtgaggacttcaattcccacgtgaaggtcttgttcatattaactcaataatgtgctttgatgtcctaatggggaaagtagtattttctgccagttagccttcccaagatatcaaatccaatattggccaaatacatttttgaattcctaaaaagcctaaactgatgtcgtaacacagctgtatattaacataaaaactctgtaccttagtaaattattaatatgagcgattagctcacagagtcaatgtaagaaacttgtttcaactcttcatattctagcaaaaagaacacacacacacacacacacacacacacacacacacacacacaaaacctgatttaagaactaactaggtgattaaagcctacttagtttttaattgaagtgcatattctctaatcccaagaggccaaactaatcacctttccctttttgctgctttttttctctctatttctgtaattattataatctgtctgatactgtgtttagctatatatgggtctatcttctctcattagatcataagctccttaaggaaaaggccatatttccttgggatcccacttaaaaaaaaactggattacaatgttgaaatttttatatatttccatgtcattctccaaacactccccagtttttaccaaccataaagaaaaaatgagaagagtttaaatgataagcaaatacatatgtaagtgttccataaatacactatgtttgaagttatttaaagaacttaatataggataatatttaatagagaaacttagtctagatagagcacataaaaaacattcttggaaatttgtggataaataaaagttccttgcatctgtattttcctttcatcttgaaaacatgccttgacaaaagtaagccagagctggagtacaagattcagacattggtagatcattaattggttaaactggattttatcttatttccccttttatggatccctgtctttgtgtggaattcctgccacttgctggctgttcaaggcttgccaccaggagactttctccatcaagctaggggatatttctccctcactgtcccccaccaaatcaatattcacttgctctctgactactccaggtttctgctgtctgagaatatgaacatggatataccttttaacatgcgtgaatactattcatattttaatctcggccccactgaatgatagcaaacgctgtgaattttatgcctatctcaggctacagctagtgccttatcttgcacacacacaaaaaaaatcttacttttcctacttgcttccttcttaagtgtaaaaagcaaaaagaggaaaggtgccttttgtaaactgctaaagagcagtttacagaagagcagtttactaaactcagacctctcattttccctcacacgacaatctaaaacagaatgttaaagtgaatttatttggttctgtatacctaactattcctgaacatactgagttctcttttaagaaatcatacctgcctgacaggctgctttgcatgaacacagcattccccagccttcaaattgctgtcagagccgttgtgtcattttgacccacaatatggcagtattatccacattctatagatgagttaacaaaagcttccaagtggttaagtgacttgcctgtaaagggttaagtgacccacctctaaggggtagaattggtctggacactctgcccctctatcttcatgcctttgctataatacacagctacgcttgctgaagattaaggaagctgcttttgataaagcgtgattcttgtagatattcatctcaggaaaaaaaaaaagaaaaacgctggtgtcttcatctgtagcatttgattattacattttccttatctgtttcaacttaggatgacttccttgttcgcttaattgactggtaattcctttgtttacttttttccaaatctcaagaagcaagtctagagtattaacaatggttacattagcatttaaaatttttttttgaaatttgagtatttcagaaaggggtaatttaggcaggcatgtatgtagaactttgcattttaattaaaaagactcaaaatgaaatgaacctctgacagtaacagatgactacttctaaaagctgcattactacttgatatatgctcagtattttcttgtgggtaagtcctacgacttgtttcaagaaaagtgacaggactaaaacaattaaaaaagacaaagctgctgttttttaatcatatgttcataaataaaactaggttgtgaattgtttccagagaagcaattgacaaagtatgagtaaatcactctaagaactaaagctgcgttgattttttttaatgttcaaccaaacatctatccttgtccaatgatgaattttctttgacaaataaatatttacaaagtatgaaatatagactctgtgcctttcctaaggccaaagcatactgtttaaactaaaatttaattttttttctcacctcaaatacaccaaaataagaacataactaaaaattaattctctcttgtagtagactgtccattaatcttttgttagataatattagcattgtgagtgtcaggtagaaagaaaaactgtaatttctagattgatcagaaaatgtgagtatttatggatttgaagaaaacaataaagtctgataaaatagaattttctgtaacctcccttatggagtcaagaaggaggaatctttcaacatcctcccattttgcagtgaaaagtcttcatgcagtaaatagtttgcttgggtagatcaaagggttaatttacttctgatttgagaagagacgcagacttccctgatttttttacaaaaatgtgttgtgtgggaggaaggtagaggcctcagaatgaattcactaattggggttttcacctgctgtgagtctaatcgaatacaaagccttatttgtagctgaagaggaagagagattatgcagagtgtaagaatttctgcccagttttgaaattccgcttatttggcacaatcggtggggaaaggcagacaaatagttacaagtttgagctgttaaggtagaccaggaatgctgtagtcagatatacttgaaccacattaaccagtgatccatttttagcaggaggtggtgtgggtcatatacatgggttatcgctatagctggcaggctaataggtactccaaattctttcccatgaagcaaccgtcggcctgtgaggttaatgaagtatggctttattttagtgaagatgctaaaattcacatctttttagatgttcggcttgatataggtggctctgtgaagctttgagaaatcttattaaaagaaaactgtgtgagagtgaagcagagctcgactttatctggaacctgtctggtgaaatctctggtttagatggcagctggctcacagagaactttcctgagtctggcttactctgcctccctaaagagacagggcctggaaaaataggcttttgtgtgggtgtgaagtgctctgtgtctgaacttagaggcctcttcatttgctggttaatgtgacctggctggatattcttacatccagaagatgttggtttcagattgatctagggggattgttatatatatatttcaattagtatgctataatatttgccctaaccagcaatgattcaccatacaccaacccatttgttagatgtctgagtcactgttcatggttagtacttgtactatgcaaagaggaatatggaattcttatgtctttattgtatacccaaatgctgacattttactatagaatatgtattcgagttaattgaagtgatacctatactctaaatgaatttttataaagtgatgcaggttatactaaaacttagggcgcactatagatagagagaagctgaaccctaggagttggtgaagtctctcgggaccatccctccaggcaagtacccagttcaaaccattccttgtctttgtcctttcctatgccactctgcatttttacacagctagcatcaggccaacattgaaaccacatgcaacccagaaaggaaaaagatgtgtttgtggaaggtaggaacagcctagtttcagctgttggcccttcacagcctccactagatgggctcattcgaacccaagacccttccaacagtacactgcaaatccatagctccaattcagacatcttccctctgagctcaagactcagatgtccaactgtctcttggatacctgcacttttacatcaccacctccaattcattatgttcaagactggattcatcatctctttcctaaccctcttctgccccctcctcctgaaattcctagctcggagaatgctactcatccaatctttgttgtcactcaaggacaatggtccttaaccttcactgcatattagaatcacttggagagtcttagaaatcctaatgtccaagaccaattaaattagaatctcagggtggtgagacccaaacatctaaatttattaacaatccctgagtgattccaaagggcggccaagcttgaggactattgctttacttcttccctctcttccattcatacatccagtcagtcaagactcctgtagttggaaccttattgtatcatttctccacctcctctgccactgctgtaattcagatcctcctcatactgcaatctccttgtacctgatgtctgaatttcagactcttgtcttctgatcaagcccccataccattgcctgagtgatttttctaaaagacaaaccggacagagccacactcatgctttaattctttcttccttaaaaagctccctcatacctttcaggatacaagtcaaactccagattgtcacactaagccctttccagtttgcccatttctctaacccttatcttgacattctctccaaaagatcaagcagaccgttgaagctcttgtaaagaacaagctggttgcatcctttttaccctcacatctgctgttgtcaccatcataattgttgatatgcctttaccctcaaaaggccagaagctctttgtgggcctacagaggaggcttctctgaatatttatccaatgactgagtctcatctgctttttagccccagagtggggggatctgactttctcctctatcagtagtccccactcagcatcaagtctattgccccagagggtggctttggctggatgggtctcagtttggtcagggtcctgggagaaacagatggtacattcaaacggaacacttgaagagagtataatgaaaaggctatttacaaggctctaggcaggctaggagaaaaaaaaaaaaacaaggaatggtaaacttttgcccaaagggataaagggaggaatggtttgcgtaactggtggaatgctattgctgtaggaaaggactggccaacaagacttgtggctgcaggtcaaggaactcagcagctgccaggccagagatcagtaggagggaacctgaagaataaatacccaaacatcaccttcctcctgtcctttcctctccttctgtaggcctttcatcactgcctcccaattggctgaaagcaaaaggaagccaaacggcaggaaagcctgattgatgtccccacagaggtccaacctcctgggccacagagcagaatggagaaggacaaagaatagagatggatgggagaatggggaagcatcctgcacagtcccttaggtcagagatgcccttattctctaaagataccctcaaagtttaagtggttcaaagaccagagttttggctacgggaaaatgtactgggtcgccttctttgacctcatcccatttcatttcttctttatctctatttctagcaaatttactcttctctgctctgagccatcagtgagattgtctatgagtatactagaaaaaacacagacctttctcacaggaaaagaagccatgtctcttcatggcagcatagcagaatagctaagcgcatgagtcttcgagctggattccccaattccaatccttgcaccattctagacagtggtactgggaacaagtaggtcatggctgattctgaagtcaaaattttagctgaagtttgttctggtagcagagcttcaggctcttttcatgtccgtggttcatatcaaaacagtaataataataataataatataatcagaaggaggagaagaagaaacatctactataaacaaacaatatattatcatacatggcatcactacataatttacatatgacacgaaggtatatcaattatgttcttttccaaatgctttcctctaataagcaaaattcataatctgactgcaattgaacaacaaaacagtctctgtgatgcccgcgtcatttcttaatactttcagtatttaattataatatgacgtcaagatttgggaacaagtcttcaagtgcctataactccagtctaaaaaagaacttaaagatgtatttttgaggattgccatctgtcaatttttttaaaaagtctgaatagtgatttcttattccattcttttttcttgtcaacagattattcttagtagttttctaattggacactgagaaaagagacttaagcatttatagagaagcgtgtcagaactcctgaattttgagcaggtaatttaaaagtgtaaaacaaacaaacaaaaaacaggaaaggaagagagtgacaaatgtcttactatccaggtgttacaaatccttagtttatcgatttgtaatatttacaaatgtccatgctctgaggcttctgtcttttcgttgaaataaacataaacagtagttaagtgatttgccacactgacacagagattggtgtctctgatttactgcaaagggcactacttcctcattacaggacactaatccctcttccccaaggatcggagcagacctagaatatactattagaccaagggacaacttcagccaaagcaaatcttagtgtgcccccctcagaccgtaatagcagctgcctccacaactcactagcttaaaattgctaaagggcaacactaagtaatctcagtgtatgagccagaatgccagaagaagtgccatatttgcttaaaaatagcaataccgatcatacttacatgcacatatctttagtgataacatttacctttatatttggtttgttaaaggtaataaagaatcctggcattcccttttgcttttgtccagatactttatttttgcctcttttgccatgctatagcattagataaagcaaaacgggtgtgcttccacctaaaacattctagggggaaaaatgttgagcagaaaaggattatttcaaaagaagccggatatggtggcatgcacctgtcatcgcaggcacttggaggctgaagtgggaggattgcttgagcccaggagttgggagaccagcctgggcaacacagtgagacccccatcccttaagaaataaattttaaaaaggggaccacatttaaactgtagaccgaagtggaatgaatcaatcggaaaggagagtggaaagcaaatgtttgaaagaaaataaaaagaaaagcaagccaacaaaataaatggacaaagaagggcagtgaaaatatcactaacagtttatcgtaagatgctctttggatgctaatctaaggtgttatgtgaagtttgcagaaaattcttgtgctaatgaaggctttcttcttcttttgagtatttccaagcttgaaataattgtgtgtagttaacttctatcatcatactgcaaactctaaaattagaattatttgaactgttcaggccctgtaacttttccaataaaatattctattagaaacaagttccttctagatcttcctaaaagaatactaaaggaccaaaccgtgcaacagcactggtggtattgtcttaatttagagagtccataccagtgattctcaaacattagtatgctcagagtttctggttcaataggtctgggccgggcccagggaattttcatttctaagaagttcgcaggtgatactgataactgctgttcccagggtctacattttgagatccgctgctatgtcacaaatccaaatccaaagtctttttaacaatcccttttagcccaggatgagcctaacggcaatttcacgtccttatcgccggccactttaatcttcaactgaggaggaagggagagtgagaattatgtatataatttttttcttttattttttaaaaagaaaactccaagcccacactcttaattatctgggatgaggtcatttgcacctgggtcatttatttagacaacaagtagtcttgctagaggctttaaggaggtgttagcagagcggtgtgtggcttccaggttcctgggtctaccttaaatccccatcctctttctttctttctttctttctttctttctcttttctttttcctttccgttttgaaagccccaactgcccagtctctgggtgtccgggttcccaggtccctaggtgggggcggagcccgacacggccccgccccgtctgcccgcagcgccccctccccggcccgcccgcgccggctcctccgcagtgctttcagctgtgagcttgggcggcggcggcggcggcgctccactttcggggagcccggcggctctgggaagctcactcctccactcgtacccacactcgaccgcggagcccttgcagccatgagggaacagctcaaagggtaagtggatcgcggccccggccccgtctgatggccgcaatccgtgcacttgtggcgcgagcagggggcaagctgaggcggtcaaaacttggacaggcgcggcggctggacccggggcgccgggcggctgggcgtctaggaacctctcccgcgggttcccgcggcgcggctgcaggtgcgcccccggggtttctccccaggcgccgggctagtgggggaacctcttccctcggctttgggacgggctcggagagaaaaagctgatttctccccgtccccagaggggataacgcgttcctcacgcggggattggggccgggggagcttttcactcctttccaggctgccagtgtggacgtgagcaaggctggctgttcctaaatcgtcgctcttactcgtagaaggaaggggcgcacgcggcgctaccttccattgcactgcaagtgccaaaaggtcaactttctgcctgatttcttccgaggattccaactgacatttccctcgctgcattttctaccgtgctcattccatgccccaagacctgcagaaatcaggaaagaaagaacaaacaactaaagcccagaagtcaaagatttcagggggtggggatttttgtttgtttgggcttttttttttttttttttttttttgcccttcgggattgggtgtggagtcatttctagggtgttctctcgcatttctccaggtgtctgtgctcatcttcaagcaaagtttgtcactcccaatcccagcacggcaataaaaagggcagaacactttgcttatattagtcaaatttgaagttaagtttgaagctttaaattgaaggggtttagttgctcgagggaggcataatattaattataaactgtttttacatcatgaaaaaaatccatccgatttaagtggtgaacttttaagtggcgtctttaagtgaaatctacatttttccttgggcaataaactcttcttggtcttctgctttatccctgtcatctctccttgtcacccaccccccccccccccacacccccaatcaacctttctttttttgcctagcttttttattgccttttactcaagcccctctttggaggatacatttgctgttggagaagcgagtggagcaaatgaagcaacacggttatatgaaaggtctctgacccttgaacaccgtggaattggtttcagtcatcattgtttgatctccgattggacacgaccctgaaaagaaattgctttgaccaaagttgagggtgggtaggagttaaaccttgaaaagcaaataaaacggaggacaactaacagctggaacagccaccgaggcaatcatctttgccctggctttagccagacagaataaaatggtaaatatcccagggaacaagaaatggggaactagaatggatttctgatgcttatattgatgcccacccctccaaacccctgccccacggtagcagaaactttaaaatatattttaccatccacaccctgccagtattccagcaatgcaagccaagttcaacaattcagcacgcaaatgccaaggttcctctagaaaaagagtctgatcctcagattaaagggaaatcatttgtgtgtgtggatcaatgggctccagattatatatgaaaccaaactctaatcctctgcaaatcgcaagagaacgctccctttttatattgctgcatagcgattagttttctccctgggaagtagtggacagatagttttttaaaaaggcaactgtttggaatattttcagtaccaaataacaatggtggcagaagaaatcttattttaattaggcaactgccattttcccagccacagcagtagatatttgttactttttataagtgtttaatgtttgtttttaagaaactaaaaaagcaattccaataagtctgattattccagcactgacagcaggaacagctctgaggcagttataataaccttgcacactacttgaaactaaagcaggtgagagaaaatttaaattgtatggtaggaaattaggtcagccttgtgctcagtagagtaatgctttaatttcttattattgacaagtaggtgttgctggggtcttttgtcatagtcgatgactttatattttaatttgcatcagggtcctatcaccgcctcaaataaaagggaaaaagattatcatggtttgtagaaagaagaaggagaggggaaatcttcgtataaatactgctcagagaggcatatctgatgccaggctttggaaccagcagggccaaaatcaataacattttttaaagatgtaaagagcgttttaaggattatttatgaagctgatctctgtgttaatgtacgtacagacttgtgatctatgttgaacattgttgttctcagaaaggccaaacaaagatgtacccattaacatgtgaacaggtttcagaatttcccttttggttgttcatggtatatggggagtgtatttccgatgtggagagtgaaatgcagaaaagagacaattaccaaaacagtgccacccacccttccactccctcctccctagcacaccgtgtttttctatatcgtctgcatattccaggtaaatgtgggctcttctcatggagttactgagaattctctactgttttagaaggcaggcacagagtaagaaacgaagctgtaaaatcggtattgatcacagacaaaaatgtggtttgtccttcaaggtacaagatagatatgagttatgcagatttgtgcttacagtttcatccagtccatattcatagttcctatctattttggagggttaaatgtgtcccagtggggctctggattcatcacaggtagaaaataacaagccgtgaagtgaatatttggttcgtcatatagttaccaaagaatctgaaggttttttggctacgttgccaagcatttttagcattaaatgattaaaagactatttttctcgttttaagaattagtcacaccctttattcttttcttctttccacttgtgctcacttcttttgcttagaactgatttgcaattgaagtgaaactaagactgcaaaggtgaaatctaaatctgtttttctagttcttttgcattgcttagaaataaaaggtttgtgtgttgaaggtgagaaaggttagcttctggaattgtttgaggagttcatttatctatgttattcaagtcccccagaatcacagataactgggagaatagtacctatcaaggactagtatcttaactcacaaatgggcaatggaattgggggcttagaatttcctccttcttccagtaaaggagattttcagttttgccgaggactgatggattaaaaaaaaataatttctaaaacccttttcataattttaaccttcaaaataaattctttaaaaaggcaggaatgtatgtatgccaacagtcatgaaatttctttagaagatggggagctccatgaagccctcattcattctatgtgggattctcctgtaaattgtacacactgtttccctttccttttagaactgtgtttggtacaggtttatttcttgcctatgttcctctaatttgaagtccattccagatggtggcttttcaccgtggttccctgtctctgtctgatcaggcttatcagctcagctaaatgtttttctgcagacctatagaagatgctacggtccttacaaatatcctggagatgggacattgttgttacacagtgtgactagtaagggcctgtgtgagcccttgtacatgtgggcacacatgtgtgtgcttcctctcttcgctcttcctttctccctggtgcttatatcacatctggatgacctttggaaatagaggaggcctgaatgcagggtggtctcaatagaaggtaacctttccttgctctgcacttatatatggaattggtatacactcactttccgagctgagaaatgcctgagaacaagcaacactttttccacgaagctgcaagctgcagcctccttgtgctgtgcatgtaaagtaccagtcctgcctaccccttctccagatcataaaccggcttggtcatggggtgtcctaaaaccccttaaagcatagagaccatatctcctgctcttcttgctctttaagacttgaatgtcactctgttatattccctcaactgataagcccttgttatagtcctcaaatgtgagttgtctctatggaaaagtaaaactgaaataaacgtatttggaagacagtgaaacagcacttcacaagtgaacattttcttgcaaattgatttcagtagccctcactgttcaatcactgactagtaaatattacagggatggtctttgaagttgtacagtttggatgatttccatatgtctttatgaggtttatgattgtgttccatttcttaaaccaacttaaacggttgttttaacttattttttttaaacataggtgataacatgtagtgtgttggttttgctctctaggaagggtctttcttcgccttgattgacttaattacagttggatccacatctatattgtaatcaactaataacagatttgcttttaatagatgacaatttgaggggcacatgataccaaaagcgaccacatattgagcaccaaatggtgccggtcacttacctatttcaactaatcctttaaccctccaaggtaggcaggcttgctttaaatttcaccgccagtagggcgcagagccctaaaattcaaaacatacgctaaggccattcgacattgttgcctctccagactcctctttctgtgtgaggcccctgtactttctggtcctctggaaatgccccagtttaagcgatttctcttttttccttccctccccttcccctcaaaagtttatgaataggctctgcatatgagtacccaaatatcattcagaactgcattttactgtatcaaagcctgtcatgcaatccctgaaaactggaaatatgacgctatggtgatttatgtagatgggccaaagtaaggaaaagtatatgtagttatttctccagggtttattcatgtaattgaatgaggaacaaaggtgttttgttctttttgtggcaggagctgatagccagcaaccacacttcaagaaatggaagacagctgtgaatgcttcattcaggcccaagtaaatataggaagaggtgtagtggtgtatagcgtactgcgtttaaagaaaaaacactctgaaataatgggaagaaggaagttatgatatattagtcaggcagtagatataccttaagctgaaatgaaatacaggtatcatggatatgagatctgtatatgtagaggaaagagtaatggaaaaatgtcaggggcagtgaaagcaaatgagaagtgagatgatttatatttattgaactaatgtccggtatctctttgacagagttgaataataatcagttgtcggtgtcctttctgtagtgttccacattggatgggtgaagaagtcctgatagtcgattattgatcacataacaaggtcaatttatcataactgaagtgcgatcgatttgtgggtgcaaagaagaaacaaattctggaaccgaataatgtttatattgcttttctctttggaaacaaagcagaaaggggcctttctgcttgtaagataaacatttcttcaatacactatggaagcgctttgaaataaagattccgaatggttcaaaagcaaaaatcatgttgttgttattgttgttttcttttttcctgttttcttgactactcattgtaaatgctaaagtctttctttatgttttgtgttttagccacgagactcaaacaacttgctgggaccatcccaaaatgacagagctctaccagtctttaggtaaggacatggccatgtttcctccaagttaaatgacaggtgacctttaggataaagtagtttgcagtgtgaaagttacttgctatataaatacatcactagattgtttcaagggtgaaagcagtggcaccttcctatccaaaattgacagtcagctttctttttatcagaggttccttaaaaacaagttttagaagttgattgattcctaaaaattcaatatacctgagagggcctataggtctttgtagttctctttggtgcctaaaatgatggaaaaacagttgcaatttatggctatttttttttttcttcccacgaagatagaaaactgtttcaggtgcttgttgatttcttccgtgtgaaaccaagacaacccttttgccaaaccacaaatgttgtgtaaaggaattttctgccgtctttccggtgctcacaattcctaaggcctggcgggtcattaatgtgaacatttaaatgatttctttagtatggcttgttttgtgtttatgtaagagcctgacagttctgttttctttcccctcataacttgaattattttgaatgggtacagagcatacaaataagggtttgaaaacaccagtctttttacactggacaaatgtccagatgtctggtttgtcgttttagatctacaaggaatattctgaaatgagttatcttaagttgcagcttgttttgggttttgttttgggacagggtcttgctctgtctcccaggctggagtgcagtggtgcggttatagcttattgcagcctcgaacccctgggctcatggcggttcttctgcctcagcctcctgagtagctgggacaacaggaatgcaccaccacacccagctcatttttaaaatttatttttatttatttttgtagagatgggtctcactatgttgcccaggctgtgtttttatgtatttttttaatataaaaacgtcatgtcttttctactttttcaagcctgcatttctgtgaatggacatattgatagaaaaacacataaggcgatctctttggatttaaggttatgtgatgaacactgtgggaatcagggtacttaaacataaattctgtgtaggtatacgtaagtggggtgtgtgtgtgtcagggggtacgtagctattactgcttttgtgtcatagattctcacaaaatgaattgcagctatagagacaccaaggactagagaagagatattagccaaaaaatggttttattaaacatttttctaattataaatgattaaatgtcttctagaaaacctgaaaaatgtaaataaaaaacatgaaaaaggaaaaacaaagtcacttatactagccagagagatccaatacatttcgagtaatattatgtcatttcagtctggttataagtgtgtaaacgtttaaaattttaaataaaattgggatcagctaattttcaagtgctacatttccagcccctacagaatgtttttggcttataattgtggactgtttataccacaggtggaaaacgtgaatgcttatcttttggcaaatgagagaatgaaaaggcttcatctgaagtgggcagcagctgtcctgggcaagctggtctttctatcccagtactcccaggacccctgattgtacaagagaaaaactagaaatctgtccacaaagagctaatttaaattagtctgtgggcctcctgatcgtaacctgtggtttacacagatttagcccacttctaacatttcctactctaattacagtaatttctagttgtaatattttaattcactcttattttaaaatcattattattatagaattaatacctattcatatttttgaagtttaaaaatatagacaggctaacaataaagaagagacaaatcattcgtaaccccacttcttagagttagctggtgtttaatagtctaggatcttcaaaaatgtctttctatacatatatttttatagaagttgaatcattctgtcttataacttgctttttttttttccactggaaagtaatgtattaccatggccatatttccattttgttgtatagtattctctaccactttcaattactctgtaatgagaaattgcaaacatgtttgatgaaaagctaattatggactatcaatgaatacatgtttgctcctttaatacaaattaaatatacatttaatcattatatttctaaaattttctccatactttagatgtggtgataaactcaaaactgataatctctcatgacttgtgacattgggcttgtgacatcactcaattttgaattataacagaattttacagttgcaggggattttagaactcatttattgcaaactttctcttttatgaaatcaactttcaggtataatttttatataataaaaggaagtcatcgtaagtgtgtgatcaattccagccccctttgaaattctgtttcttgctagcccaataacaaaccacttgcaagtgaactaagtgttgaagtttgcttttcacctttcagagttaatatttccaatagttttgtaacaatcaaacattcgttgggcttttatccaagtggtgattcatcagataacatctcccatttattgcgggcctattgtatgttttccacatgggatgtgccagcaaccaacctgcatggtggatggtatcaacatccacatttcacaggacagcgaagccaggctcagggaggaattgatcagggctacacagctatgtggggctacacctggatttgtcctcagttttctgttagtactttcactgttctcattgattttatttactaggtaaagtatatttatgttggttactacatacctgctacacgtatataggaattgatagttttacctatgaatagtaagttacttgagtggtatttctggaaatggtatggtgggtcctaaacaatgggcactcctttcactgttgcctggcacatatagaatgattgttatatggctacatccttttttgtttgtttgttttttgagacagattctcactctgtcacccaggctggaatgcagtggcacgatcttggctcacggcaacctccgcctccccaggatgaagtgattctcctgcttcagcctcccgagtagctgggattactaggcacccgccaccatacccagctaatttttgtatttttactagggacggggttttgccatgttggctaggctggtctcgaactcctgacctcaggtgatcctcccaccttggcctcccaaattgttaggattacaagcgtaagccacagcgcccagcctgcctacatccttgagatcccatataagattaactaccagcactgcctttccccctctccaaaattacagtgtttcagagtcgaaacataagcataaaatactgaaaagaaacttttcattgattttagtttttacttattagtttatatttttcttcttcaagaggtatccctttaggtccaaattgctctttgagctggatgaaatggtcggaagccttcaactacagtcagttggtgaaaggtatcttgaaagcagaaatggtgttgtggtctggcgtgtcaaatgtttaagaccacatctagccccctctcctaatcgaacctgaacctcatgtctctggtgaggtgctgaaaatatcaagatgttgctttttccctctgtacccccactccaggcatactctaccgtggaagctacagtggttcacagtatgcatggtaggttacacattcctagagacgcccacttctaaggagatttccattctctaatttgccaaagttcccaagcagcctgttcaacacatgtttatgttacctgccttgccctcaaaagcattcaggtgttcccctgcacccagggtttgaacacaataggattagaaggtgaaaacattttgttagaactgaaaaagtagcaagtatttactgatgaaaagctataatattgcttgagatattaccattggagctctctaatacattctgggtggttttctttttcattccttttccactgattttctacaatgaatttatattatttacagttagatgtttggtaaaaaagtttcttcgtcgatacccccattccatttcttacttagtgtctctatagctacaattcattaactaatgagaacttatgacagaaaagcagcagtagccacacacacacacacacacacacacacacacgccccacatatatgtagataatttatacttaaggaccctgattctcatggactttgtcaggtaactttaaactcaaagagatcatctcatgtatttttagtctgtatgtccagttgtgaaaaatgcagatgtagacattttagtggtagagaaaatagaacttttttgattaaaaaatagataaaaaacaatataagataattaattttagattatttccaacagatctaaaatggctttgcagaggaggtttccatcaagtgttagaaatattgtgtttccctcatttatcggctgtgtacctacacaaaaaattgagagaaaatattgccagagtcctacacaaacaaagcaagacatagtaaagaaataatttaaaggttcactatgatgactgaacagtcattaggaatttgagtccccagaaaattttttacatcacattaatggtttgacaaaagcattgtcttggattttcacagggaataaatcactaaaagcaactggaaatcagttttctttcagcatttgtctgtgactacccccaatagtcatagaatggtagtagagaatagtagtggagtaagtgggatataagagaccaagtgtctcatgtctattttttgtagaccttggtgctttatctttaaaatgtgaggatattggggctgggcacggtggctcacgcctgtaatcccagcactttgggaggtcgaggtgggcggatcacctgagtcaggagatcaagaccttcctggctaacatggtgaaaccccatctttactaaaaaaacaaaaaattagccaggtgtggtggcacatgcctgtaatcccagctactcaagaggccgaggctgaagaatcacttgaacccaggagtcggaggttgcaatgagctgagatcacgctgtagcactccctcctgggcaacaagagtgaaactccatctcaaaaaaaaaaaaaaaaaaaaaaagtaacgatattggacaagtgtctaagatttttgtttttcttttactttgggctgagggtggggcaggctgtttctaaacttgctgtgatcattatttttcaagaggtacctttcggctaactctgcagacaagtggatttctaaaaatgtaatcattcctatgttttaaaatgtacattctgagaaaacaaacaacaggagaagattatgccacccatccgtgtcttacaggctgagtgaggcaagctgttgtcaaatagagaggctcttgagatatttcccattagactcctctgggtcattcatttgttattgagagggtacattcttcgtcactccctagaagtaataatatgtttgattcatgaggtgagttttagatttctattagcatttttacaaatgtaatggaaagactgttccaataggttagcttggtgatttaaaactctgagctcttcaaggctccagaaagcatttacaacatcagtagatgttagatagtaatatgctctggaatttattttgaaatactaatataatattgatttacatgaagtgcaattatgtggttaaaagcctgtccttttctcacaatttatgtctaggtccctaagttcattactgaaattttaagaaaatattttttaaaaagctcaccctgcccccacacacataatatatgctgcttagagatacttttattggggtttttttttttttttttgacagcatcttgctctgtcacatagactggagtgcagtggcctgatcatggctcactgcagctttgaacacccaggctcaagtgaccctcccacctcagccttccaagtagctgggactatagccgtgtgccaccgtgtctggctaatctttttttaaattttttgtagagatggaggtcttaccatgttgcccagcctggtctcaaactcttgggctcaagcgatcctcccaccttggcctcccacagctctgagatcccaagggtgagccactgcacctggccttcacaatttccaatgtcaaatcttactacaaatttaagtaatcaagagtatttacatatggacagatatactgaccaacagagtagaatttaggctgggcacagtggctcacatttgtaatcctagcacttttggaggccgaggcgagcagctcacttgagctcaggagttcaagaccagcctgggcaacgtggtgaaaccccgtctccccatctctacaaaaaatacaaaaattagccgagcatggtggcatgtgcctgtagtcccagatactcaggaggctgaggtgggagggtcgcttgagcccgggaggacgagactgcagtgagccgaggttacatcactgcactccagcctgggcaacagaacgagaccctgtttaaaaacattatttcttagcctgtcttattgggggggggtctcttaattataaatacaataaaatatgtggttccccaatggttcctttttaaattacaatgtgagtttttttgcatttgtgatactgtcagtatagtacaagaagaccagtttatgaaggagacatgtaggtaaaaataggataatgtgaagagagaatcgctgcacttcagaaagctgattttatttcaagcagtttattaaaatctagatgcaccgtatgttctggtgttacttattccaatttccttttccttcattgaagccctcttaaccacaagtgttttctcaaggggtactggttttccttttcttaagttatagcgttcttcagaaggatctagccctttttaatctgttgcccaatttttggatcctactatccagcatgatgctcacctgaatgatgcgaaagctctcaattttcaaaaatggacttctgagtgtttttggaattcttaggaaaagtggtctttaaaaaccataagatttgaaggcagtctatcagcacgtagcccttagcttcatgtctatggtttgcagagagcttcagaatgttaaaatgagggtttaattttagggtctgctgggcctgaggttaggggtgtgattcttcagcagttctagttaggagaactagttaagtcctagttaagtcaatggggctaaaagctttttaaagatacatcaatatcattataaatcagcaatttgcaagagagttaaaaacactgctatcaaaatccttgtacctctttcctcagcttgcccaagaggaagggatattgtagttatttgttcactctcctcttttgataggctttctacattccattaagtattccctcctgaggatgctcttgggttagaaactgcaggattctgaatgactatgaattccttccttttgcattaggagcttgtcctaatgcttttctcagcatattttgtgaactaaactgttctccactaagctactcaatatttagctttccttggctcttgcttctagttccttaatatattgctcagtgttaaaacctctgccttttgactttttactgccataacgctttgaactggaaaggatagctagattcagatgccagctttggtgtgacctcgggcaagtcccttgctttctattggtcttcattttcttatatgtcatgttggccagtgatctttcatcattaaatgactggttttgttttaacccctggctagagtaaagcttggttgtatgaatgttgtcagccctaaacccccagttcctctttgtcaccaccaacctaaaggatatgaataataggataatcatatttattaatttaattttttttttttgagacggagtctcactctgtcgccaggctggagtgcagttgcacgatctcatctcactgcaacctccaccgcccgcgttcaagcgattctcctgcctcagcagcctcccgccaccatgctcagctaatttttgtatttttagtagagacggggtttcaccatgttggccaggatggtctcgatctcttgacctcatgatccacccgcctcggcctcccagagtgctgagattacaggcgtgagccaccgctcctagcctataatcatatttgtaataattgtactttatttgtgtagcactttacaatggcgaagagttttcagaaataaccatatttaatcctcacacagctatagagtaggtggcatatgacctggattttctatcaatttcagtttcagattttttgtcctgtcatccctttgagtgtccttccagtttttgatttgggaaataatgctaccataccggtggatggggcaacttttcccttctttccatttggacttgagcagactgagactcaagacttgatttgatttatactcactatggtagaagataaggaaccaagtccagaacacacattttacaaactccgagttctctgttctcaaaggaacatccattactcttagcatgatttataaaactgctttatcggcataattaaactggaatccatatgacattctttattccctagctgacaaaattagcacaggagatttactcaaatttgttattaaggctgttataaatgttcttcctttactattcagcttataaaagaaaaaagaaaaataatctgctcttttaactttgattaggatccattgactttccccatttgtaaaatagaaatgtaacttccaaatcaaaatttatggcattttaatggactgttctaaatattataatattttttcttgttcaaataacttgatttaaagcttctaattgaagaacataatagatatttctgaattgcatctctccaagcttatttcagaaggaaactcaaaaagaattgttccttagactttgactggtttacagttttaaaagagctgccaaattgtagtttactgatctaaataagaggaacattaaggttacacctgcagctagaagaaaagtgctggatatgtacaattttatgtagctggatctgcagaagatgatttttgcacacagagtaaaggcatctaaaaacgtgtctgctcttattcagacatttccaatatttcttttttaagcccacaagtctgattacctctgtatgtctcttgggagctgcaattttgctggaaagagattcagaacagtcagagcactcacataaaatagatagtttttaaagtctgtaccctctacggtagtaataaaatgacctaaaaatattctgaaagtctctcttatgacatagtggatgaatcattagcttatttatgaattggtgatattctgtgggaatgtttcaaaatttgctattccacaaagcgttcatcgcttgcataactccaggaaagtcattacaccccctcataaatagaagcttatataacggagacaaatgttgcttatattgatatatttacatacagatttctttaccaagcattaattttggtaagaaagtgattgtttttatattttactttcttggtctgtaaagaggctatcactttaaggccaggcatggtggcacgcacctgtagtcccagcgcttccagaggctgaggcagaaggatcccttgagcccaggaatttgagtccagcctgggcaatatagcaagacgttgtcttagaaaaaaaaaaaaagaagctatcactgaagagcagtgcttctcaaactggtgaagggccaggtttttgttggtggtgggtttttttttttgtttttttgagacagagtcttgctctgttgccaggctggagtgcagtggtgcgattttagctcactgcaaactctgcctcccgggttcaagcgattttcctgcctcagcctcccgagtagctgggattacaggtgtgcaccaccacacccagctaatttttgcatttttagtagagacggggtttcaccatgttggctaggatggtctcgatctcttgacctcatgatctgccagcctccgcctcccaaactgctgggattacaggcgtgaaccactgcacccagccgcggtggtggtttttaacatactacacatcacagatttttaggtggtgctaatgaaactgacaagtatgcattcacaccacatgtaactcaacagtcaagttcaacaacacttgacctcgtctgtaccctgctccatgagatgaattcattgatcatgaatttggatgtcatggcaatgtcaaattgctatagaagttacttaacacactgtccatatctatgcttgtgaaagaccatattttgagtagcactgttctagagcacttaatttttgaaagtataaatgtaaactcaaatcaagtgactcaggtcgggggaggataattaaccaaacaggaacacctgaaaatgttatttatgcggtttaatgttttgccagttgagtcaagttcaggcagaggagggatctattttctttcccacttggtagctctccttagcaattgttttagaagacaaagcatagaaatcattgtgttacaggaaggaaccagagattaagcggcagagccactgctgcctagtttaatgtctctcgcaccccctataattaaatataatgtatataatgtgataagtttaaaatacaggtttgcttttatctagaatataaactgtgatatatgcactctttatggggtgcattcagtgggggaactaattgattatactgtgactttcctattgtcactttatgagtttaggtttggaggcaatgttttgcagcaacaaaattgttcattgactttgaggctggatttaaattctgattctgtcaccagttctctgtggtcaaaaaggaagccactaataattttaaacctcagttatgtgatgtattaaatagttatgatgagacttatcttgtgttgtgaggattagaatgacatatgtaaggtaacagaatgtctgatgtagtaactgctcaaggaattataattgctattagtgatatgcattattattattagttattattatcatataccagtgtctctccttatttaataatctattgggttcctgaattgagataccaagaattcagatagtgagagacacctaggtttaggtcttcacatttgacactcaaggagccactaaatttttctgaagtattttacttcttaaccaaggtgataaagatcacctgatcacaatttatcctaacttttggaaagcatacacgtactttaatttgacatgcaaattaaaataatacattttgtactgtgttgtttgccctcccccaattctaaaataatatatcattcaggataaaaaagactacactttgggaggccgaggcaggtggatcacctgaggtcaggagttcgagaccagcctgggcaacacggtgaaaccccatctctactaaaataaaaatttaaaaaagccagaagtggtggcgtctgcctgtagtaccagatactcgggaagctgaggcaggagaattgcttgaacctgggaggcacgggttgcagtgagccaagatcgcaccactgcacttcagcctgggcaacagagtgagactctgtctcaaaaaagagcataaatatctaataaatgatggtggtactagtctgtggtagtggaggtatcacagaatggctgtagagatgaggagggctaaaactgtgaaaagccttatatggtatgttgaaggttttttatactaaggtttttgatttggaagatgtatcaatcagggtctgcctggtcagaaaacataaaccctctagttatttcaaacaaagggaatttaatgcgggaaattggttactcaagaatggaagtgctgagaagccacacacacagcatgaagtttctgttatacctagggctggagggacaatgacaagaggtggtatcaccagagccccagatgtcatgggcatcaaggcggagttggaacctttggccagctgggaccaatgagggaggggctccgagggagctggagccaggaaggagacacagttagccagacctattgccggaggtagaatgaaaaaggaagtacgcccggcttctcctttccgcctgccctctaggcttctgccagtgactcctattggccaaacttacttggaagccaattggtaagggagcaggaaaatgtactgtaataaacagcagagcagagaaaaggcagagaaagtatcaaaaaccaacaagcaaatgattgaagtacaggagatcccatggacagtaaggcaaccaaccctctatgcagatatttcgggaacaagaaacataaaaaaactaaaaagctttcataggagtttgaggtgacatagataagataccagaaggacatcctgggttcaaaggaaactgatcttaaaggagaggaggtagcaattaaaacaaattatctgcagagaagtccaaacactaaggataagcttccatgcatttgatgaaagtacttgcgacgtttacaggtgtttatgctcatgactctcaagactaaatacagacataccttggagattttgcaggttcagttccagaacacttcagtaaagcaaatatcacaataaagtaagtcacacaagtgttttggttttctagtacatataagttatgtttactctataatgtagtctagtaagtgtgcaacagcattatgtcttaaaaaacaatgtacataccttaatttaaaatactttattgttaaaaaagctaacgatcacctgagccttcagccagtaatgatccttttgctggtggagggtcttgcctcgatgttgatggctgcacagcatggtggttgctgaaggttggggtggctgtggcaatttcttaaaataagacaacaatgaagactgccactcagttgactcttccttttgtgaaagatttctctgtagaatgtgatactatctcatgaaaccacttactttgctcatccataagtagcaactccctatccattaaagtttgatcatgaaattgcagcaattcagccatatcttcacgccccacttgtgatttcaattttcttcctgtttccactacatctgcagttacatcctccactgaagtcttgaacccctgacagtcatccatgagggttggaatcaacgtcttccaaactcctggtaatgttgatattttgacgacctcctatcaatcacaaatgttcttaatggcatcaagaatcacttccagagattttttttttttttttttttgagacacagtcttgctatgttgtccaggctggagtgcagtggcgtgatctaggctcactgcaacctctgccttcctgggttcaagtgattcttctgcctcagcttcccgagtagctgggactacaggcgtgtgccactacgcccggctaatttttgtatttttagtagagacggggtttcaccattttggccaggctggtctcaaactcctgacctcatgatccacctgcctcggcctcccaaagtgctgggattacagccgtgagccaccacacctgacttccagagattttccatttactttgcccagatccatcagaggaatcactgtctatgtcaagctatagccttacaaaatatttctcaactaataagagttgaaagtcacaattttttcttaatccttgggctacagaatggatgttgtgtaagcgggcatgaaaacgtgaatctctttgtacatctccatccaagcttttgggtgacaaggtgcattgtcagtgagcagttatattttgaaaggaaacctattttgaacactaggtcttacagtgagcttgaaatattcagtaaaccatgccgtaaacagatacgctgtcatccaagctttgtttttccatttatacagcacaggcaaagtagatttcacataattccttttttttttttccttccaagacggagtcttgctctgtcacccaggctggagtgcagtggtacgatcttggctcactgcaacctccacctcccgggttcaagcaattctcctgcctcagcctcctgagtagctgggattacaggcgtctgccaccacacctggttaatttttgtatttttagtggagacggggtttcaccatgttggccaggctggtctccaactcctgacctcgtgatctgcccgcctcagcctcccaaagtgctgggattacaggcatgagccactgtgcccggcctgatttcacataattcttaagggccctgtgatttcagaatggtagatgagcattggcttcaacttagtcaccagctgcattaggccctactaagagatacagcctgtccattgaagctttgaaggcagtcattgatttctcctctagagctatgaaagtcctagatagtatcacctttaaatagaaggctgtttcatctatgttgaaaatctgttgttcgttgtagccaccttcatccatgaccttagcttcatctggaaaacttggctgcagcttctgcatcaatgcttgctgcttcatcttgcaccttaatgttatggatatggcttgtttccttaagcttcttgaagcaacctctactagcttccaacttttcttctgcagcttcctcatctcttttagccttcatagaattgaagggagttaaggttttgctctggattaggctttggcttaaagaaatgttgtggctagtttgatcttctattcagagcactcaaactttctccatatcaggaataaggctgttttactttcttatcatttgtgtgctcgcagggtagtacttttaatttccttcattaacttttcctttgcattcacaacttgactgtttggcatgagaggcctagctttcagtctgtctcatctttcaacatgctttcctcactaagctcaatcattaatagcttctgatgtaaagtgacagaggtatggctctttcttcccttgaacacttagaggccattgtagggttattaattaccctgattttaatattgttgtgtctcagaacaggaaggccagaggagagggaaagagatgggggaacagctggtcggtggagcagtcagaacacgtatgacgttgatcaattaagtttgccatcttatgtgggtgtggttagttgcaccccaaaacaatttcagtagtaacatcaacgattactgatcacgattcaccataatagatataaaaataatgacaaatttgaaatattgagggaattttcaaaacgagacacagacccaaagtgagcacatgctgctggaaaaatgtccatagacatgctcaacacaggattgccacaaaccttcagtttgtaaacaatgcaattttcacaaagtgcaatacagcaaagtgcaatttaatgagatgagcctgtaatgagcctctttaaagcaggaactgtcttcctcatctttgtcaccagtgcctggtgcatggtagcctctgaaaaaataattgttcattgaatgaagcacagtagagcaagggagagtgattttgctcgggaggaaaacaaataccactcaagaagatggaaagatacagatgagggttttctaaggcggattattaaactggcaagatggaactctggagagatggagttctttccagaaagtagaagataaagcctcaaagtaattaaaatagggaatatcagttaagttgtagattttattggcaatttgttatcttagcaaaaccaagtgaactgctattctggaattaattttgccctaaaaggaataattaattgataaggagaaataagacccgtaaaaagtgtcactatggattcagaatttatatgacaaagaaaggaaacactgaacacaatttgatgtgctgatggcctcgttcgttcattggtttcctgcttcagtaaacatttaagagcgtgccatgtattttcaaactttagggcaacaggctaaaaatatcaaggagaaaaacgtttactgagggtatagaagtttttatgatcttacttttattgaacattaaaacatggatgttcattctagaaattttagaaggtgaagtgcaaaaacaaaatgaaaatcacctcacatctcagtacccagaaatagccactatttacattttaaaagattgcttccggtcttctttcctatgcatttttatatagttgtttgagataatagaatgtttaaagtgttgtatcctactgtaatcataagtcttctcttattcttagttcctcagagatgttatttttcgctagttgcagtttattggggtaccacttttgtaaaaaaatatttcccaatttttgaaaattgtgacaaagaaaagtcaaattcgtgttgaatttatggaaggaaatctttaagaatctggaggcttattactaacaagcttctgagaagaaagccaagtaaagtgttataataccttctgtccaacaagctacttatgtataagtgatgttacagaataaagtcagtgtggtcaaaaacagacagtcagttatcagaaagttgataagtaacatttatcctatgaaaaatatagctatgaatttaaatcaatagttttctaccacaaatatcttaatggataaaattttctttaccaaatatgtatggtgtcaaggtgacaaggcaagtatccttgtaaactttccgaattacaggaacaactttgcccttcttagcaagcaattttatacagaaactcaactttatgatgggtttctgtaagttttaatttttataataactgatatgtaaatatttagttacctttaacttatctctccaggtagaatggctagcagactgttttatcttctcaaaacatttgtgtgtacagttcccatgttcttttcaaggttcttgcttctaactgtcagttaaggcttttgtagcctcttacttcagttacattttctggccaagacgcaattaaagaatatagagctgataattatttccatagtcgtttccaatttttctactgttccacgtaagactttgaggaacacctttatgcataacacctttctacatttgattcatgtaagtggaatcactgagtcaaatggtgttaatgtttctaagcttcttggaatgcactgcctgaaactttctcaaaaggctgtagccatttacactcataatacttcaaagtgccaatctaaccatgtccttcccagcatggagtattatttttacttttgctattgtaacaaggaaaattaaaccatctcattgttaatatttgtgtattttttatttctagtgaccacaaatgttttcttttaaatatctgctgggtgtttttcttcttttttgagtaatgtgaaaacaaaacgaagttaaccaaacacaactcttccaaacttttctgatataatacacacttttttgtgtgttatgttgaggggctctagttggtaacagcctcctggttacataaatactgtacagtttaattttttttcagctaaataagccttatccctttatccatccttagtggatctattatctacccattaaattaaattttattctctataccaactcctgtttcttcacattttttaaatatatgcagagccctaaattacagtggctgtcctaataaaaggctattcagttattaacagaaaaggaagattgcttcctgcctcttgggtgaggaagactcatgtataccatagatatggtcagtttacatttacagttttctgtgaggcattgatttttttcccccataaatatggagtacttagaatgttcaaaacctttctctgggtaatagaatgcacaaaagtataaggcatgatccctgttcattgcccaagctggcgtgactctggtcatgcagcggacttcatgatgtgatagaattccttgcctatgagagtgaaggagatggtaccaggtctacttgtggccggtggtggaacacttacattattctaagtcctttctgtctgtagaacccaaatgacaaccatattattttatcttctcttattgctagtggtatcgtttattaatgccaacgtatacccattttgcttttcaaggttactttagatgtcttaggttggaatgactgaaggcttatacattcaaatttatatatgacacacacacacacacacacacacacacacacacatatcttattgttgcctgctatctttctacctgttgtataagaaatcctttgaaaaaagcctatgtcagcttcacaaaagatgttactgtgttttgggggaaataaaattgggaagtaataaaacagttaataaatgttacaagaccgtgtacaccaacttaaataagattaaggtcaaacgtatggtaccttatataggtaggaagagcagtattaattagaataattagggagagttgtttggagagtggaaaaaaacattgttctaggaagaaattttgtaatactcaggtaaagtaaaatgtagggccaagatattccagatagtgtagcagcataaacaaaggtatgaaagactggcttgtttgcgagtcagtgaagacattgttctctgagaatctactccagatttttttttttttttttttttttttttttgctttttgagacagggtctcactttgtcgcccaggctggggtgcagtggtgcgaacatggctcactggtgccacaacctcctgggctcaagtgattctcctgcctcagccccccaggcagctgggactacaggcacacaccgccatacctggctaatttttgtatttttggtagagacagggttttgccatgttatccaggctgttctcaactcttgagctcaagccatctgcccatctcggcttcctaaagtgctgggattacaagaatgagccaccgcgcctggccactccagatttttaaaagggaaatctgattcagtgcccctggggtgaactaagtgccttaaattatagagtgagaaatttacattgcatttgattggcaatgggaaaaacattgttaaatcttcagaaaagagaaataatgaagtccgtcttctgtgttttggaataggaatttggtgggtgagtttaaggacagttagagaggggagagattatttcgttttgttttgaggtaattgacatgatgagggtcttaggatagcaatgggggaaggaaaagggaacgtgactccagaggtttttcttaacaaggtagaattgccagaaggtaatcacagattggacaggttttaaagaaaaagggagttatatgtcttcaaaatttgaaggcgtggtgacacagagaatggtgataccattgaggaaaagaggaaattgcaaactgagcggagcaacagggaatagatatgaatttgattgaattacatacttatgggtttatttacaatttctcttcttagaaaaatttatttttggtggctcatataaatgtatgtgctgccataccataagcatatatttctcattaatcctttcaaaaaccctgtaaaagatatttgtatctccattgtgcagatgaggctcagagaaaataggtaattttctcacattgcaaagcagggatttacgtgtacttttaactcctaaaccagcgatttagcccctcagctatactttcttcctgagaggggacagtggcattttgaagaggaaatactctaaagccatttgaaaaggggaaccgaagaaagagtttggtccacagcatgataaaaatattacttgcacttttattatactttataacaagaagtacaggggcagagaaaggttcctaacttttactgagcaagtatatatccaagatacatctcctctttggagcttttgagatacactatctctcttagttttgcaacagccctaggaataggtactattactgttccctttaaaaatgaacaaaaaaaaaatgaagcttaggaaagttaaggttactagaccaagcttattgggagaccatagtgatgaagaggaagggctttagggtcaaatggatttgaattttacttcttaggcctttggtttccttatttataaaatgggattgaaataatgatatcacagttgaaggtaattatatgagaatttatgttatttattgcaaacatagggtaagcacctaataaatgataacctgagaatttatgttatttattgcaaacatagggtaagcacctaataaatgataaccattattactattattttacagcaaagacataaatagagcccattaagttttcttctctacccagtagtttttccattgtacaatagtactctcctgaaggacagcgggtgaagctaagaatttggaagaaatcccagatagagaaatcttgaaaagaagatagatagatttaatactcaatcattaaaaaaagtgcacatgactttaagaaatcaaacattgtaagaggatagtattgaaaagtaagtctccaaccactcttggtatcaatcccctaattttacttcctagagacaattaacagtatagtttttatgtttgcttctgtaaatatttttgcatatacaaacatacacataaaaatatgcccatttttgcacattgagagtataataggcacaatgttctgttctttgatgctattaccttttacataattaacctggagttttttttttcctgtagcgcaatagactgacagatggtgaatgaaaacttgcactatggagagttatgtcagtgttttaataagacaggaacccagaaataaatgtacgaagtttaacatcagcatctcgtggcctttaagtcaaattggacaaccattcaaagcttcataaatgctaactgcttctcatgacttcagaagcaaacaaaaaaatcattattcaaatgggaaattaagctgatcatcagaagtacagagaggatgtcctttcttaaaggcggcacgtctaagggagtgtctgagacctggcttcttcattcaggatggaggctgctgctactctttaaaagaaatgttcacatccttacttcctgacttccttctataacacagtctgcttcacaacactatgactttatatgtcagagcgggttaggaggagctgaatcttaaaaatttaagaagatgccaaggtctagaaaccactcttaacaggggaaaattagaccctgcttgcttttgggaaaatttgttttccagtcagatgtttgtcaaggttaaagaaattcacgggccctctgttcgaattgggagcaattgggagcccttaagctgaatgagtagacttgaagtcccacttagaatgagcctttatatttttgttctgtggcttgctcagggaagggatacacacttggggagaaaaagacttggattctagttgatgtttttctcctagctgactagggaattcagaacaagttactaagagctttctagtccttagttctctcatttggaaaatgaaaattttaaattagagattctatttctaaggcaccatgtatttcattttcttaataaaaagtatatatattcccctaaagaatactcataagaaaaaggtagagttaaaatttcccaaattatttaattcctggttgcccagtaaccattaaatttctcagcagtcaggcaagaaccacattcccaccttgagacaagatttaggcctttccaaacttaccctcgggctctgttccaagtttatttgtaagtcagttgcatacaatttggaatgaaatgtgttataaatggtggttaggtccctaagtcacagaatcttagttaaccctcagagtgcctgatatactgcaccatgtaaatagaaagcagctgtatgtttctatgggagcaaaaaacttttgtaggaaaaatggtagaaactcgtactgcaggtgttgattattcagcaaacttctctagataaggaggactgggaacttcatcattattggtctagttacattcctggtcactccctcatcccattgactggtcagtttccctccctgtggtccttgtgcaagggtttctgcctcaccccataccctctgctccttgcccggtatcatggttcttctgagggtactactgcccattcacccttgtgctaattaggattacactgggtaaggaaagacatttgttctgtagcggagaagcggggaaggccatcagaggctttgagtgtcagaaagatttggtcttgaatgcaggctctgggatgcaaccgtagggaagttaccaaacatttgtgagcctcattttatctttaacaaagctgataatacagaactcagggccttgtaaggactcgatggtatcaggtacacacgacatttgcccttgagtgctcagcgaatgttagtattccttctgccatcggcctgtcacttccgtttttctctttggctctacagggaatacttgcatacaaaaagagctgaagtaagagtcacctacatcttaggaaaaaagggctgctttaggtttatcctcaagtagttttgtccaggattctgaggagaataaaagctgggtcagatccagtgtgttgaaaagaaagctgaggtgagaagtgagagaaacagagaggcagagaaagggggaatgagccctgtctgctatgaagtaggaggcaatccaaaagacaaggaatccgtggtcattgccactgagaggagaaagaaggcaaactcactcctgtgacttcagggccatccatgaggtgggcagaggaactcagagtctgcccgattcttggattgaatcttcaaattggtaaagctttatatcaagcaactcccaaatgcagcatagttttgaggtgataaagaagagtcttttcaaggctgggcacaatagttcacgcctgtaatctcagcactttgggaggccaaggcaggcagatcacttgaggtcgggagttcgagaccagcctggccagcatggtgaaacctcatctctactaaaaatatgaaaattagctgggcgtggtggtgggcacctgtaataccagctacttgggaggctgaggcacaagcatcacttgaacccaggaggcagaggttgcagtgagccgagatcatgccactgcattccagcctgggcgagagaatgagactccgtctaaaaaaaataaaaataaaataaaaagagtattttcccggagtaccggtaatattggttccagattcaaatgtattgtccagatacacagagggtaaacaggaacgcttcaggcatcctttattaaaagcacctcagtctatgtcagagggccaggcagtccattatctaatgaaaatctcctaccattgatttattttatcataactgcagctgctaagtaattttgtttaaggaatgatttacatattagtgtcttcagcaggatctcatcattagcatctagtctccagaaaagttaacacataacagtgaaaagaaaacattctctatcacatgcttctgcatgcatgggcaatttgagtcataccacctgttcccctcttctgttatgctagagtatacaaaaagcagagatacgcatagtttactatgatcctagatgcttaaatatcttgaattgtgttctatcttggactcattattcatgcataaagactcaacagattctcttcttgcacctctcaaacagcaacatcaacaaaacccaaacaatgtatctttcctaatgaggtgaaagcatgcataccagcctaagacagaaatgttgcaaaaatgttttttgcaagaaggtcagtttgcttttcccatggtaactaaggttaatttctactgtggttcattttggcatccattttattcatgatgattattagagggcatggatattgggggtgtgttgatgttgggcaccagagaaatggaaagaggcagatggaggatgcaaatcattttcactcagaacctaaaatgtttactgttagataaagggtagagaagaatcttaatttgactgtcaaaacatatgattagttgaagttaccaaaactatttttttaaataacatttatcttaagagctataaataaagaggaaattttgcactagagatgaagttatgaacatttcattaactctaaagagttaatgaaaaactagttgattatatgtgttcatttataggttgacacgtgaatttccagagaagtaacttgtatgtttttaaattccaatccttatcttacatctgggcagaatcagacttgtgaacgtcccattccaaacaaatggctaaacactttgcagactttgtctagaagagtgccttacccatataagccctctgttataaaattgttttaaacgttaaattagctgtcaagctgttctgcatcagtggcaccacctggtagcaaggatggagatctctgccacccaagatctctttagtgctcacgtcatttctccaccgcaaggaggattgcgggggtggacgatgctccctatttagtcttctgcattttgttgcttacagttcaattaacatgtcagttagagatgacttttggttgcagttaataaaatatctgaccaattgtatcttaaacacagaggagttgatattttttgtagaacaagaagtctggaggcaggtagttgagagctatggaagagttccgtgatgtcatcagagacctgggccatggtttattctgctgtaccatttttaacgagtgactttggtcctgatggttccaagacgactgctgcttctcaggcaggaagaaagagaaaggacgttcagcctcagagtctctttgtctttccatttgggaagggaaatcctttcttgcagatatcttctcaagcattggccaaaactgtgtccacacagcttcccctggctggatcagggaattgagatcctccagcctttgtagcagagaaagaccaaggagaaagaatttgggaaggggtgttgagtgagccaacatacagttatctgccacaattaaatacagcggattcaccttgcaaataagcattctttttagaccatttattttctttctctctttgtcccaattcctttattccttaggaaagtcttgatatctttgtgaggtgtgtttcaaaaaagaagctccagctcaggttgtaaggagtaagcaaaaataataattccagtgattcagccatagaagtggaaaattatattatttgaagaaaaattagatgtaaaatcaatgtcatcgacagcttaaacctggtaaaagcaaggaagttcctttcagaatctaattttattccaaatacatttattgagcaccatcatttattgccctagatgccaaggataagtgaacacaacatgacctcttcagaagtctgcatttttctcatcttttttccctcaagtataagaatgaaaaataaagctatttctaattagttacatcagtcatttctatcagtattactatagattttatttttattgtatactggatatttaaactaaatttaagcctttgtgggcttagaaattactgtttcatgagtaacatggcttatgtaggaaatttccaatgccattaaccttaaaaatgttcattggaatactgcttatgtcatcttggaaactacctttgcggttgacatataaactgcacgatggtctattttcattatatgtttctgtatgtacataagcatcctcatgataaagattgtctacttgatcaaacttcagccagactcctgaaccttctcctaggcccacctgtgcacttctttgtaaaaatccagctgtagcgagaatcctgctaaatcagtttagcaagaaccaccttcctcttatgtatctgatcaggttcctcatcctccaccatcccccatgtgacgtctgatcaccctggcctgtgtcttcagcaaggttcctgttaagttttttttagctagaatcccccttacccccatgctttctcttagtagttttccatccaccaaaccccaccctgctccttggctatcaattcccacttgtccatgctgtattcagagttgagcccagttctatactgaggtctctttcccactattgcaatattcctgaataaaatctgtttttaccactttaccgtccatctctggtttttctttgacactcacataaccagagttttgtatgtgtgtgttgcttgacacatcacaaatacctgggatacgtgtactgattttttacagggtgaataatctttttgttttccccaatatcttagaaacctgaatctttaacccctgggcttagtacacagttaggcatataataggtgcttaagtaagcgtcaactgatgattttaaatgcagaagtaattgtcacttaatgaaatatagtcaggagactcatggattttggcctgtcttcctacctgttcttgtactgcaacagtaagtgtattaaggcaatatttttggcagcacaatcatttagtttgaatgcattagtaaaaggtggagtccaaagaattaatcgctggaaagttttgggaaaacccagtaacaactgtttccatagagtaatttgagtgacagccaggtaatagctacttattggagggactccacagtcagagccttgacagggacctgaaaaagagtgtaactgaagggtaaatgtaaaagcttttgggagaacaagggagtggtcaggctgaggcaaagatctgaaaagaaatgcctcctggggccaagctggtaatttgaatgactgaaggtgactgggtgggaactggggcaacctgaaaagcttctgttagggtaacagagcctccgttgcagctgactgttctatgagaatgtgagtctctattgtcaggtcttcaggttcttccagagaagcaagacaacgggaaatcaccagatttttaactaatggcgtatcattcaacaatttcaaaaaccattatgtgagcccaaactgaccaacgaatcaaacacacacacacacaaaaaaagagtctgcagactaaattcaaccagttggtgacctctggtctgtggttaccagagaagtaattgaaatggagttttgggagaaagatcatatgttgaaatcttgggagataagggcagagaaataagtaagccgagacggcggtaaggccaaggtagaaaaggtagcctttaggaaaattaagttaagactttttaaaacaggaaggggcaaaagatgaggttaaagcagatgaggaaatttactgttatttattttcatcattaaaatacgctttccacaaatttttcaactgtaagagagagtgataaattcaaaataggtaatgtcaaccatattatgaagagtatgtttttgcaatccaaaaaagctaaggcacaacattaaaaaaaaaaatctgtgaatttggctttgcaaaggtataagaattaagtcacatctgatcatttttagagtcttaccttttataacaaagaggaaaatttaattaaactggctctgccctggcgaatctgggatgtgtgttcacttatgaagagagactgttaagattcgttaattaatgaggttgagaatagagttgaaggagattggggtaaatttataagtttgtgtcattctgagagttctgtaagtagctgagttacccatgttgtgactgagaaaaacaggagagagcagtgactgaaggttctgagccaaaggaggagaatagtattgtttattccagcagccagagtggcctgtgtgactgtaagtcgcctgtcaagagggagactgcaaggaaagtgcattgatttgatttggagtagttgtaactgcagcatgaagaatatgatatatagggatgataattgaggaacaatttaatggctgcataccttgctgaagttgaagttccttctggagataaaggtggcaaaaaagaaagtgcttaggtagaagagctttttaaaatgagttaacagaaaacagcagactaaatatggaattgaggagtaggaaatgaaggaaatgaatttgaagatttactttctttcaggatgcagagctggtatgtaatccctctgtttccagtgccttctcccacttccaaatttcactgctcctcatgcgccctggtgtgtggtgcagcttcgagattaagcctccagccttctgtcaggatgaagcagcaggtggctgagatgctaggctccaagtgggggaggtgtttagggctctaaagactttcaaccagtccttgtattttcagccacatttcagtcttcagaggaacctggagcctttcatttctgagacttcttggctacataaactggcatgcgtcttgttagttcctcccactccctgccccaatctccttgtctccccaacatcattaattgagcttgggatttctctggtctcctaagttggttaccagcaggtcattttctaagccaccaaaatactggagctctgatctgttctcatctcctctcctgttttgttaattttcttttgggtaaatgccattttttattcctcttctatcaacctggtagagtttcagggataaagagagacaaatgagtctgctccatctgctgtgtttaactagaagtcccaacacccaaaatccttcacacgatgtgcagggctctgcagtgggcctccccctgcctacctgtcaggccttatctgtgcccactcttcctccttcctctctgagatttcagcaatattggccttctaaggattcttaaagccccaccttcttctctgcttcagagcttttttttttttttttttttttttttaacatgtgctgacctattacgctgctgtgttcttacctggcacgctcccatcatccttcaagtctttgcttcaatgtcaccttctccaagaagcctctcggacctatgtttccctatgtatacagtctcatcacttcctgtgtgtttccttcaccattttaccacagtacatatgaatatttgtttgttagtttgtttgagacggagttttgctcttgttgcccaggctggagtgcaacggcacaatctcggctcactgcagcctccacctcccaggttcaagcgattctcctgcctcagcctcccaggtagtagctgggattacaggtgcctgccgccgcatccagctaattttttgtatttttagtagagacggggtttcgccatgttggcccaggtggtctcgaacttctgacctcaggtgatctgcctgccttggcctcccaaaggctgggattacaggcgcgagccaccgcacctggcctacatatgaatatttgattattatccatctccttcgctacactgcaaagtcaataaaggcagagatttattttggttaccagtgtattccatgtacttggcatggttcttggcttatagtacatgcacaataaatattgaaaggatagatgaaaggattatggatagatgaatgtcttttaagcagttataaaacagttctgcctaaagagtcttttttaatcagtagtattacttcaaatacatatttaaatacacatatgttataaatatataaaatatgtatttaaatatgtcatttgtactattttaaatgtatttaaaataatatatgttatatattaaaataatactaatgatttttaaaagatcaggcaacactgctttgtagctttttagaagacatttatccttatggatccataattattatggattgtatgttttatatataatgaaggttttgggagttagagccctgatccttccgctcttgaagcttgatttaaaggagcatggcacagtggtgcctatatgagtcagccctccattatctggggcagaattcaggccccagaaatggtacttaagatacacagttctcccccagaaaactttatatcggccatttgttacagaaactgctttctcaacaaaccttttaccagggcagctaacaatgagcaaaactaatttgaatttcaactctgccattattacagtgttgctaagaagtagtgagattctgctgaggaaggccaagcaagaggagggagccagaaatgccttaaacaatccacagccaggattttgtgctatcttttatttcacagttgaacttctcagtattttttggttcataacctttttctcttttcctcaattctgagtcttccacatttgtgccatactaggtactttattgcttctctcccttttttttttttcttgagatggagtctcattctgtcgcccaggctgaagtgcagtggtgcgatctcagctcactacaacctccacctcctgggttcaagcaattatcctgcttcagcctcctgagtagctaggattacaggtgtgcaccaccatgcctggctaatttttttgtgtttttaatagagacggggtttcaccatgttggccaggctgctctcgaactcctgacctcgtgatccgcccgcctcgacctccataagtgctgggattacaggtgtgagccaccacacctggccctctccttcatttcttagaagagttttacaaagtcattggtgataaataagtaataccatttcacatctggaaacataacttgatagtaattataaattcacagactgtactttctgtacttatctaagtatgaatgcataattcctgtttatctgtgtgtaggtttatttttcccccatttaagtaaagctctatgttgatgatgaggtttttacgagttgagattttaagaggcctcaaatatatctaaaaaattatagaccaagtatgatgtgttagtgttcctcttctctcagctaattctttaaagatatgttccagaattcctggtctgttcttgaagatctcccaataattctagacttctgaagcctggatattttggcttaatttgctttcaagacagactggatttaaattactcaatttgtctgaagtctcattaagatccaaggttcttgtctgttctagtgagtttgagctggcaagaataatacttgtcatctgaaaagtccattagaatcctttggaggagtgagactggaaaattggagacatattattatattttaaaatatgccacctttctataataggagtatgtggggagactgccttgttttggcttcttgggaaaatttggaaaattagtaaaataggcaggcagtagtagttcaatgcgtattgtatgccaaacactgaatttagaacaatactcccccaaaagcatatgtgctctaaattttatttttcacttaccacctgggagatttggattaaatttcttctgggaaatagagttggtatgaagaaacaaagaccactataccaatttatctgttggaataatcatttagccgtacagctctttccactcataaagttaatgaggtcattattgttctttctagctaatagataggcatattgaaaccttaggcctttccaaaaagtctccataagccattggaaagatagactaaaacactccttgttttaaattctagacctcagttcagtcagagatagtaggatttttgcagtattattaaaaagacagaaaccagctataaaattgaaatgaagggacttaatgttttttttctgtaatatctttggaatgcttccatggctttaaaatgctgaggtgtttctcactatttttcaaaagcatgtaacatgtagatatgtgacgcaaacttgaccagttgttcctcttttctggtgaattttgacacctgctactattacacagagtaaaagtgaaagtcataaaacagaaatacttaccaaagtcaagaaaaatgcatagactaaacaaaggggcaagagaagcctattacttgtttcatgtttcaaaataaaagatgaatggcctatcacttcagtagttggaaattcaacttgagaaggtaggtggtttgatgtttgcccttgttccttacgtttctagatttctctatttataggctagaaccagccctggataaaataatacaagttatgaagagaaatgtgcagttcagcatttttacccttctgaagtgcgctttctcccagctgccatggaaacatggcgtaactggtttcttggatagtctcactcctcttgagttccggctgtgagagctagtgagctcattacaacttggatcagagtcctggaaagtcagctcccagggaaagtggaggacagtctctcatggggcacgggaatggggggctttagctttattaaactgcatacatactttcactacacagtcatcccaagctttagcccaggacagtgtcacattgttcacagctgtattgcatcttgaggtttctgtgtgcatcctacacactttcctaaggcagagacttatctcttccagctgtaagccggagggagtggtgctgcagactcctagcaacacatgcggactcaaacaacacaggcagttaactctcttgagtagtagacttgtagggcaccagaactccgttgcagttcactgacagttaccagatatacatttgtatggcttccgtagcattgtgatggaagctaaacgtttgccctgctactttcttttttttttttttttatttttttattttttttttattatactttaagttttagggtacatgtgcacattgtgcaggttagttacatatgtatacatgtgccatgctggtgcgctgcacccactaactcgtcatctagcattaggtatatcacccagtgctatcccccccactccccccaccccaccacagtccccagagtgtgatattccccttcctgtgtccatgtgatctcattgttcaattcccacctatgagtgagaatatgcggtgtttggttttttgttcttgcgatagtttactgagaatgatgatttccaatttcatccatgtccctacaaaggacatgaactcatccttttttatggctgcatagtattccatggtgtatatgtgccacattttcttaatccagtctatcattgttggacatttgggttggttccaagtctttgctattgtgaataatgccacaatgtgaaggacctcttcaaggagaactacaaaccactgctcaaggaaataaaagaggatacaaacaaatggaagaacattccatgctcatgggtaggaagaatcaatatcgtgaaaatggtcatactgcccaaggtaatttacagattcaatgccatccccatcaagctaccaatgactttcttcacagaattggaaaaaactactttaaagttcatatggaaccaaaaaagagcccgcattgccaagtcagtcctaagccaaaagaacaaagctggaggcattccctgctactttcttctggtatgcctgaatcactgtttgagaatggattggactttggtgcgtggaaaactggtagcagaaggcttattcactgcagtgggttgggggtaggctgaaaagatgtcagggaggattaactagaggcagaatgtgtcatagttagaagtatttagaagggaagaaagtttgaactctgatactgttccacactaatattcatgccctgaaagaatcagatcattcttgcctctcccacttggatctctagctactggaatttgccaattcttgatatgaacgctaagatttggatggagcttgtgacctcatttagaccatttgttctaaatgctgaatagaaccaggaaaataggaaaagagggtagaattggggtcataagagaggaatcgtcgttctttgaaagaagaaagatgataggaaactaggcacatgagttacgaggcagtggagaaggaggattagaaagggaaaaaaagaagagaaactttatgccaatatcttctacaagatgtttggctggcacaaaactaacactcaatacttttgcataagtaaaggaatgagagaaaatttgggattggatgcttatcccctggaaactgctacaggctggtgttaatgggaaagggatctgtatttgaccaaaagtgcatttccacgtctctacatttctttttataaagagtcaaagggactcaatgatgagtgtgtgtgtaagggaactccacactagcaagtacaggaaaaatttgatggtactggtgaaggatgttgcaccaatctggaggggaggacaggaattggtttctcatggattgatgccgcaagacaattcataccatgagttggctgagaccacttaaaaaagtaagcagtgatgactgggcaaaagagacaaaggaagaaccacatcttttaggggagagagagagaaggacaattaaagggactcaactagatcaagttctgctcactaaaggacagcgtccaggcaaatgttaattatcttcaagaagcaatctgtatatatagcatttcaagatactccgagatgcttttaatttattgaatactttttattggtatttatcataaacaagagactcacaaatatatcccagaggggaggttttggtgtagttgactatagtagttattaaataatctattaataaaagcccacaaaatggaagatagaaagatagaaaaacaaaagacaacacaggatggtgttggtatacagaatttatacttgaagtttaacaacacggaacaagaaactttattaaaatattcatttaaagaacttccatatgaatcaccagaggctcttagtaaaatattgattcggattcacagatctgggtggggcctgagattctgcatttctcataagctccaagcagatactgatgctattcttcctcaaatcacactttgactaacaaggactcacacaggttctctgtaattggtgttggtagtcattcatggttagatgtagttgaggactgccctcttaactacctctcggctgccaggttataaagaaagcaagtctcagtacaagttctgtcacttaggagcatttattagccaatgggtacaaaacaatcttacagcctgtgccagagacacagtgaagtcacagttctgtcttttggggtgcttggtgtgagaggctcacagtctacacaggccacagtcctctattagagtggttctcaaagtgtggtccctggaccagcagcatcagcatcacctggaaacttgctagaaattcagattcccaggcccttcccatacctactgaattagaaaatctggaggtggggcctaggaaatctgcatctttaaactatccactccaggtgattctgatgtttgctcaagtctgaaaaccattgttctagcagcaggattccctcaaccatctaactgaattctggcaactaagaatccggtgaaccacagctggacattttggaattcagcctagggcaccatttctaaagatggagaacctactggattcttcttaaactcaatttaaaggcagggagtgtttctaaatgtttttcaacaatcttcatattttgcaaaccactaatatcactacacaggcccgtctaactattaattaggaaaattaatgaaacccctggtgtaataagagctaaatataactgaatcacttacagtggccgcctgtggcatgaggctttttgattaattgctagccaaccacccttggagttcactcctgattaagacaactgaccacctctacagtgtagcttaagctaacacacacatacatcagagtgtactgttcatgtgagggtttttaaagactcttaaaatttaccttatcagggcataatttaaacactataacatgtttccattttaagtgttcaggttagattttggcaaatgtatacactcgtgtaaccaccatgccaatcaagatataacatttcgatcacctagaaaacacccttgtgttcctttgaggtcagttacctactcccaccacaccccaggctaccatctggcatagtagctaagttttgcctgttctagaagttgatataagtgaaatcaaacagtatgtactgttttgtgcctggcttcttttacccagcttagtgtttttcagatcagttcacattgttgcattatcagtagttagttcctttttattgcactttgcacagtagtatcccactgaatgactttaccacaacttgtttatccattaccttactggttggtttccggtttttgactattatgaataaagctgctatggatattcatgtacacatctttttgtggacatacatttttttttattctgtgcaaatatccaggaaaagaatatttgagtcataatatacatgtgtgtttaatttcataagaaactgcctaactggtttcccaaagttgtcgtacattcccaacaagcagtgtctgagaattccagtcgctccatatcctcaccaacatttggtattccggtcttttaaacaaaattgtatgctgaatagtttaaattacagacattgttttctttcccctagttgaaattcaggcttttatgtttggtctctgcgatggccataaagctgaaaatgttgacccaagtgacttggatatggattgaattattgccctttcctaacacctcatcagaattggtttcgtaggtgtcatttgattatggcagtcatgtatgtcagtgtactttttctttctttcattcttttgtttattgattcagttggtcagtcggtccatgatctgtattaaaacagctttttcagagggcagttgcatattaagttgctaggaaaaatgacagaagtaggtgacagagttcttgtcttcaaggagctttttggagctgagttcctgaaataaatgtagcccagtatctatcaaggcttgtgcagacttgagtaagaacatcatctaaatatagcttcctgctaggtggcgtgagtcagggcttgatagaccggtgactgcagaaaccacagtaacatatattgttgttattctgtgctgaacattagaatgattgtaccttagaatatagagccaaatgtttattttattcctaattatatttttaaatacatatcacacacatagacacatatgttggataaaaaatactcaaaatgttaacagtgcttatttaaaaggtttatataaactttttttgtagagatgggatctcactatgttgcccaagctggtcttaagctcctggcctcaagcagtcctcccaccttggcctctcaaagcgttgggattacaggcatgagccactgaatccagccagttgtgcctatttttgagtttatgggcttgtggatgatttatttgattatatatgtatatgttaaatgtctaagttacccaaagtgagcatgtataacttctacagtcagaaaaaatgttatattgccacttgattgtttaaggtcttatagctatttaaataatgtatttcttgttctctttaatcttgtgcagaaaagattcactacagtagatccagattactttctagaaaaaaataatgcctgtccatctctttcctcttgggaacaggactacatgaatgcccttcaggctataccactttagtcttcacagaacttagccttcctggttgtcaaagggcaaaaggaattattttttcttttccccacgttaacagaattttcacctccgaaagcttggcgtatacacactatatgttttctaggctatttttgtggtggttgtagttattggcaaatcactgggcgtcgggggtgggttgtctgttatttctgatggaataacaaatgctctttgttttccctcttttcagctgacctgaataatgtcagattctcagcttataggactgccatgaaactccgaagactgcagaaggccctttgctgtaagtattggccagtatttgaagatcttgatactatgtctttgcttagaataaaaagtaggttgggtacatttttacttagagaggggagaaacagctgtcacaattcctgttgcaatgtataattcattctttaatgtatccttggcctagagtttgcctagaatgttttgttttatttttagaatcattcctgtcaccattcctcagctactgatgttgaattaagatattgagaatttttattttccaactactggcattggcatcggcatccataattacctttgtgaaacttgcacaatccttgttctacctttgtttttttttctttttacaaaatgtacttagtattagaagactatgactatctgatctaaaccaaacttcatagacatgtgtggtttattagcttgaatgctaacgtgcagatgaatgaagtggtagaggaaaaatgacagaattgctttcctccttttttatcatacatctgtggaaaaatcctgaagtgttacacagctctatcatgtcatcaaatagtttatgtataactctactattgtctgagggtctgtgtgcattgatgatatgcccatgaaacaggcacagtttctttttctttttttctgtttttttttttttttttttttttttgagatggagtcttgctctgttgcccaggctggagtgcagtggagtggcgcaatatgggctcactgcaacctccacctcccaggttcaagtgattctcctgcgtcagcctcccaggtagctgggattacaggcatgccccaccatgcccggctaatttttgttttttgtttgtttgtttgtttgttttgtttttttttgagacagagtctcgctctgtcaccctggctggagtgcagtggcgcgttctaggctcactgcagactccacctcccgggttcacgccattctcctggctcagcctccggagtagctgggactacaggcacccaccaccacgcctggctaattttgtttttgtaattttagtagaggcggggtttcaccgtgttagccaggatggtctcgatctcctgaccttgtgatccgccctcctcggcctcccaaagtgctgggattacaggcatgagccaccacgcccggcctaatttttgtattttttaatagagacggggtttcaccatgttggtcaggctggtctcgaactcctgacctcaggtgattcacccgcctcagcctcccaaagtgctgggattacaggcgtgagccaatgcgcccggcccaacaggcacagtttctgctctgatggaacttacagtctaacaagggataaccaggatgttcatgaaatttgtagacataagcaaatatatgtataatgtattaagaatgtctacagttggttaaaaaaataaagtgatcttgtctctatttccaagaccatttcaatgtcatatatttagttgtgcaacagtgggacaatggggtactatgtgaacagctaactgtgtggaatgagattcaaagaatgtttgtttgaagaggtgatgtctaagctaggtaactctagaagagtaagcagctctctctctaggaagagcgttctagtcagaaagaagagcatgtgctgaagggcccagagaaagcatgacacattcaggaactgaaaatatgtcagtatggctaaagcacagaattccaggggaaagatctattgtgaaataataggctggagagagaagcaggaagcagattgtgcaaggtttttaaaacccaagttaaggaatttagaggtcaggggatttggcctgggggtgacataatcagattgtcgcttagaaagatgattcttgctgtggaacagagtatggattggtgcgatgtgggagtgacaggagaaaaacctgttgcagtaatctaaaccagcaatgtggtggcttgaattagcagagtagtaagggagataagtggagagaatttagaaatatttaggaagtggatttgacaggcctcagtgattcatttgatgtggtgcagggatgtccaatcttttggcttctccgggccacagtggaagaagaattgtcttggaccccacataaaatacactaacgctaacggtagctgatgagctaaaaaaaaaaaaaaaaaaaaaaaaatcgcaaaaaaaaaaaaaaatgttttaggaaagtttacgaattcatttgggcctcattcaaagccatcctgggccacaggttggacaagcttgatgtggtgggtgaaagggagtcaaggaagacacttaggtgcttggcttggaatatcaggtgaatgtgggacttgtctggtaaggttagacacggagctgtggtgctcaggagaaatatacaaacaacgtttagggatcatgagcctgtaggtgctgcttgtaacgggggagaggattggatagctccaggaaagtgtagcgtgagaagggaagttatttaggacacaggataagcaacctacagaagggactgcaaaggaatggccaggaggaaagaaggaaaattccaagaggttatgatgccacatgctccatgggaagaaagaaagaacccgttaccagggtcagatgttgctgggatgtcagcataaagttgcggaaaatgcccattggacttagcaacaggaaggtccctagtaactttggtgagattttagaggcacagtggaagtggtgtggtgagttcaaaagtgaaccaaaagtggagaattagagaaggtatgaatgattcttggagaaatttacttatgaaggggagaagagtggggtggtagctagttggagggggctgaggagttaatggaaatgtatgtacagtcacgtgttgcttaacaatggggatatgttctaagaaatgtgttgttaggcaactttgttgttatgtcaatataggagagtactacacaaacttagatggtatagcctagtacacacctaggctgtatgggatagcctattgctcctaggctatacacctgtacagcacgtgactgttctgaatactgtaggcagttggaacacaatagtaagtattgtgtatcgaaacgtatttaaacatagaaagatacagtaaaaatatataatagtgtaatctcatgggctcgctgtcatataggcagtccattgttgactgaaatgtcattatgtggcacaatatgtgtatataagtgtgtgtgtgtgtgtgtgtgtgtatacattgatccttgaacaacatgggtttgaactgcttgggtcaacttacgtggatttttttcaatcaaatgcaggccaaacatatagtattcgtgggaatgtatttatatgagtatgagaagacagggtgagattacaattattggcccaagaggagatgataaataatgggtgttctcagagaatacgggcaggtaatccagagcccaagggagggaagagatacctctcttccactgtaatgggtggggtagagggaaggatctgggcaggtccaggtaactaagaaaccaggtagcagcaaggtgaaggatgtcttactataaaggcttccattttttgtatggagtggagagtccctgcaacgcagttaacagcaggagatgatgaagttgggcttatctttgtggagaataagagagagggcggagttgaaaaccagctgtgtgaacccagaggcggctgagtgtttcacggtagctccaatctgcaggggtgtggtatttccccaggcacgcttagcacttgggagccagatgcttctgtcctggggtagggagggaacagctgggcaagagaagtgaggatttgggcaaaagattgattaaaatgatactgacaagtccctgttgggtaggagaagctgtgaacgcatatggaaactggtaattaggaggtagagggatgaaaatgctaactcttcagggaggtaggggaagaagtagtaaaggaactgaaggtcaagaagttgtggtcagagagaatcatagatgaacattattttgaaggtggaacagtttcaggtgattagatctaggatatagccatttgagtaggtggcagaggtagagtggatgtgaatttccatggaggtgaaatagcaagttaaggaactgagaggctagaatgatgcatgagtcccccatgccaatgttgaaatcatgcagaattggagcgagaactgggcaaaagagaaggaccgtgaaccctggctgccaggtcttcagaaataaaggggttcaaccagaggatctgcagaggctagcaataagatagtcaaggagtcacttggcatatggttcttacacagagatagagaagaaatgccttagaagtggaattatttggaaagagagactaggccttttcccttcatcttggtatccccaatgcttagtacaaaacctggcacacagcatggttcaatatgttttcatgagatgaatgcatgaatgaaagtaaaccaaggcttccatttccttatagcccgaagttatcatttttcagctatatagttgccaagtttaactggtgtttaaagggctttccaggtcgagggtttccttaggacctgttaatacgtcatagctgggaaaaagtagtttgggatgggatcgagtcagggggctgaatagagaaagttttcttgcctctttttcttcacctgcccctgcccctgcccctgccccatcccagagctactgctttcctttaataaaggagtaattaggcactggttatcatgaagtgctagagaatattcctgtgagatcctaaaagttcagaagctaaccatttgttccagtttatactatggaaaaaaaaaaaaaagaaacccagaaatagaccagatggaaaaaccttataatgactgttcctttctataatgtccattttcaccctggatttaggcattattcgattttcctgctcaaaaaaaattccattcacatatgtgttttattgtctgtcatttcaacttataatttccaataaactttgggaaaatgggggaatttcataatatacaaaattttgtccatttgaggtgataaccttgtaataaaggtaagctccgaatgtagaataatttctttaaattttcacttttaaatcaatttgaaattctctgcatttcctttctgagcatggcttttctaatatgtgaaaaagattcaagtatgccaaaattaaggtgtatgtatctaaattaagtattgaattctcattaatgctaggagggtgccatatatagtaaaactatagaatgaagagttcaccccatccttttattgaacatatgtgtggtcacattacttactttcaatatatgatttaagaattttctcctaattttatatttgcttagatttagcttccaggcttttgtcatttctaagcctgcaaagccatgataaagagctattgtctgcggtacaggcaaataaaacttgccctggctagctttccctaccaaaggccacttctaccaactctaactttaaggaaaattaatgatgttatctcagtgatttcctggtgccagtgaagagtttgaattacagatgccttggaaatatgcacttccacctctattaagcacttgatcttatttttttttcacttccctatcaatgtttccgtattgcagaaagccaaataacccaattgtatccactatagagaattcactatttaagtggagagcatcaccgttggcctataatgtccccagtttgtaatcagttaagtgttgcatgactccttactgcctctcaacacattggaaatgaaaatgaaacttggtagaaaagcaggaacaaagataaaatcttggtaagaaggatttataaactgtttcatatagctgatactccattgaaagttatgaagaaggtaatttaagcattttctttctccctttgtagttctgatgacattctacaggtgtgaggcttctaaaattaaaaagccaacttgtaagagcagaaataaaaacgcacttaacaaagcaagtgtatttagtttattaataatgtgtggtgggttggagagagcccaaaccatagggctaaatatactgcagttgataagtgtgacaaatattctgcaaacagtaagaaatagagaacattttgcctctattcagcaactaaagcacacattatagagatttggtacaggctggagttgtgtgaatagtcacagtttctggactcgccctcaccatgacaaaccaggtgaaaaatgcaccgccttctctgtaaatgcacctcaccttttgatggtgcgctaagggtgacattagataggcttcagttgctaaagaagactctcaggacccacaataacatggcttacaaatccgcgctctattgccagaaaaggctacattacaagagcattactgtcaggatatggatccacagccacaggctgcctccacagcaagggggtctcgagaggccagtgtaattattttgccactgtcctacaaaaatctactttttctatataccatgtattatttttcacataggttagaggccatgtctctgttagttctgagtttaagacgtcttgaggacatggccaaactaattttctcagtttatatggtttgacagatattagtgcccaagagaggtctcataacatgacccatctatctcccaggggaaatactgtaatcttgtttagctgttacccactagggaaagaatggttttctctcagtcagatgctaaagagattaaagaacacctcgtaggttccgttttctagtaattattggttccattctccagctatcaaccttggcagcttgccatccctatccttcctcctggaattggatgcccttgaagtgcgcttcttgcactaggaagtctttctcgtcagtttatcatttctcattcaaagcaaattctacctggccaggtatctctagcccagttcctaattctcctaatagaagtttcttttatttcaagtggattcatgccccttggcccaccagacatgttgccattgagaaatagcagctttaatgggaaatacacatgagacacaaaaatgtgactaggctaaaatcatatgaatagtagtcactcctaaaaggactttggtttgggtatgtcacagaaatttctgtagccatccatatccaatttctagcttttcagtctcaggaaagtaggcccaccaaattcaacttaaatatctgtcactgattcaagctgtcccaattgtccctccacccactaatggctttccacacggagtaatggggcaaatagctatttttttaaacacataatgttatgacagatgaaacatacagcacgtaagccttctatcacatgcccaatacctttgttaaaccttcatcatcacaattgatggccacacagtgtttattgagattgttataaatcattgttcttcagatttgactgggtaaatattccctcaggttatttcctgacacagctgattaataacagatatgtcctgtgaaagaagaaccaaaagacattaacgaatactaaccaaaagccacattaatattgctccatggtgttgtagtcgcagttagaacgcccatctcgtcatccagtgtgttggataggttggctgactctcccactcacatcttggctctttcaaggaggaggaggttttagcagagtcccccaccccaagaggcatctgagtctaagccaagggagcatattattctcttattttaaacctctccgtaggcagcaacattatattaggttttccctttaaaaaaaaaaaaaagtatcggctgggctcggtggctcacgcctgtaatcccagcacttcgggaggccgaggcaggcagatcacgaggtcaggagttcgaggccatcctggctaacacggtgaaaccccatctctactaaaaatacaaaaaattagccaggcgtgatggcgagcgactgtagtcccagctactcgggagtctgaggcaggagaatggcgtgaacctgggaggcggagcttgcagcgagccgagatcgcgccactgtcctccagcctgggtgacagagcaagactcggtctcaaaaaaaaaaaaaaaaaaaaaagaaaaaagaaataaaaaagtatctttggtggtttccttccccttgcaacaatctcacctttttccttttatcattaattttaagccaaacctcttccccagctacacacacacaccacacaatgcagacagtccccaacttgtgaagtttcaacttaacaattttttgatttcacagtgatgcaaagtgatatgcattcaatagaaactctacttctagatttgaattttgatcttttccaaggctagtaatatgcggtatgatactctctccccttgctgggcagcagcactgaacctcagctcccagtcagccacaagatcatgaggctaaacaactgacactttactgtgtaaggtgttgctagacagttttgcccaactgtaggccgatgtaagtgttgggagcacattgaaggtaggctaggctaagctgtgagtttcagttagttaggtgtattaaatgcatttgtgacttaagatattttcaacctatgatggggttgtgtgatagcttcaattaggcaaggcacaaggaaggagtaatccattccattgatccttgtggaatgcttgtgcttaagtaccaactaatagccatagtatcttattttggaatattaccagcctttgaaactcttaattgtagccccagttcagggactactaggtctggcatcaaaaaagaaacctgtagtgacatagggaatacctgtaagtgccccacttgaattatctttttaattgtaactggtctcacaggtgtagcccatttctcaaaaatgatagttgcttcagctttttggttgggactccacctgcaggccagagagggtgaagcccagtggaaagaaattctgaacttaacattagcttttggatttttttttagcagccttgccatcagtttgcaattgcctcctaatccattttgttagctccttaggttcaagttctctcacttccagattccactagaaagttacaccatcagtaaccaatttcaaagcctgtgttacttttcaaccaagcgtagcttgttgagcaacttcaaaggttctttttcatcccttttatcagaatcttctttttttctttctaaataatgcctcagtcatacttttagctaagaatgagttggaggtgttctaaacaatcttgcttctgacactcactgccctgacagtggaagttaaacagggttcaattgctaaagaggactcacaggaaccaaatgacagtgcttacgaatctagagttccttgcagaaaaaggatgcaatatacccacaacattaaaacaagaataagtgtcacagccacagcctgcctcacagcatagggtccagagaggacaggtgcaagctataattgccctctgtctgcaagagccacaccacgatgcattttctctcttggaacaagagctactgatgtgagcacagaacaccttggaaaccagggagcacaaattggagtttcagccagggtttcttatatcccgtgggtaacctaggcatactgttcctatgtaaccagcctcaaactcagtggcttccgttggtctgactgtgcccgggtaaaaatggtcaatgttactgttagcaataaacaatggtgataacctgcaacccatggctacacttcaacacagtaagtcactttgaaaagcaagtgctttgaccagggctctgcactgtgtagatattttagcaagtcatctcgtgccaactccagcctctctggaattaacccttactgcacagacaactacatcaaagtgcattgactttcttgaagtgcaaagatttgcttgggaggtccctcagccataagtgtaagttgcctgtagagtggcatgcctgggcaagaaaaatcagcaaacatacagcagttcttccaccattactcacctctttctgtttctgtgctaattagatcacagaattatttatacatcaacatagaatatacagattgacctataggatgaacttggggttatatgggcaccatgagactttttttttctccactaaccaactttttggtgcttctgttttatcctactgttgtcattagcatggaatgcagaatggttttcctgttctgtaaagtcagtaaggacaccttctgccacccacttttcccccttacaatatgtacctccatgagaaatcagaaaacctagatatcctgccataacacccagagtgagtctccatatctctggtctcagttgtctcaactgcaaaatgattttaaagcaaccttctggctctaagagtctatcactctgtaaaagacaaaaaaaatctgtcttacataggaaggaatagcaagagttagctactgtggcatacatagaaaggaaaagaatgagcttttgaagctagaaggttgagaagatgattaggcacaaccagagcctcaggaaccattagtgggatccctgtgttgaagtcctgcctgctcgccgccccccaaccgccactgtctgcttttcctgcacagcaaagaggatcctggagagtcagccatttcttttatcctgtccccaccctctctcacccccacagccctcatgcatagggtaccaccacatggtccctgttcttcaatggcttcaaagcctatagcatcctctactgtaaacataatttagaaagtgaagatgtattagaatacttgggtttttatgtagctttaaagatatatctactagtgaatacacacaaacacacacacacacacacacacatacacacacacatatatatatatatatatataatatatttaatggaaattcctagcttaaggaaacaatggtttcacacaactgtatctgctggttgcttattgagggtcctagaaagagctaatcattacatttaatgtttcatcaaaaagtctaggtgtgttctctaagatgctcattttgaaaagcatatgcatggcaattaaattgtccctattgatattctcacctccttttcgggtccatagcatggattgtgtatacctaaatggaaattttttcaaaatagctccatgaaagttgaattctgtttgacatgtttgtttagggaaatgtgctcttcagtcttctgtgatggattgttcttgtgtttaaccacatccagttttagcagagcacactgcacagtatttctctcctaactgtgtcatcttctgctcctgtaatttcagagcaattgctttgctcccctctggagctatttctactcaacatttgctgttctatgtgttacccattcacctgtacagagataagagcaggccccataaaatgaaatgcatgcagtttttctctgttcatttccatcacacggctaaataagactcttaatacaaaagtgattcgaaaaattttcactagttacttcttaaatgcctggatcagaggcaaaatatttatgatgactaaagcagagtaacaaaaaagaaaataattgaaaaacttcaaaccacccatagcttccttcagtatataaggaaacatgttgggaatattggtgtttggaagaaatccattcctctcttccagtaatggagctggcataccgtgtttctaagtgttcctactacgtgcacttgagtatgtgccctctgaggaaaacaagcacacagaagagagagagaagaaaagtttgagtcttttgtctctggacctcgctccagcctcccacgcagtcttctttcagccattccctcctcacgtcctcccgtcctcctgcctccttgcattgctttttaaaattctttattatttttctcacttgattcttcagataagtctcccaagttatcttccttcctcccactttaaagaaagtctcagcttccatgaaaagggtcatttctctatctttagagtatttcagagcaaaaacagaggggccttcccttccaagggaggagtgcagactcctgcttccaccaccatgtctgtttcatgcttctggggaaactccaggattttctgttttcctttttttaaaagagaaaaatgtgtgcgcaatataggtggaaaagtatttttgcacaaacctacataggtattaaccactatttttgtttttttcttaatatttaattagaactggccatgaataacttgtaaaatatactaaagccttaagtttgcatttctttattactgggaaaggtgtttactgagcgggatttacctctatttatgtgaactacatttataattgaattgccccttccccctagatgcatgagagatttacttaattagcattgattccttgcctcaaaggactgagaattccaaccagagcttaggtgtataaggtagtataaaagcaatgttgttgtgtttctagtttggctaataaattggctttagagaaatgcatcttttcatgacacttgggaataaagcttgtgatttgctgatgttggacaaggttgaagtttcacttttgttaaatttttgtccccagcataagattaaacacctcctcagatcaagggaattttcctccctcagccttataaagttgttagaggacttagaaagaatattatgaaatacaatttgaaggtgaaaggagaaataagcgagcctcaggtctgaaaactggatagattatgcaattactttagtttgcctatagaaaattttagtggagagtatttttttcacctaatattagggtagcagagagatgctgaggtgactgatatttcaaggagaaaagcgcttaatgattataaatgcatagctagaaatagagtttacacaaccttagccatacagattaatctaacagatcttctctaatgctaatacaagaaagtatcatcggatctctttaaaaatttctgctaaaacattttttttttcttattcaggtgacaattgactctgtttatgtagaacaggctaggtccccttaactctcagatattccccagtaatccaaggatgggaattatatctttgcccatatcttcacccaatgccagtgagatttaagaacaacttcagatcctgaatactgatcaaactcatcaacttagagtcgaggcataaaaataaaacacctttcaaagagagtgtggttcacgtttggtgtttattaaagggtatgagagagtcctagctaggattctcagaggaaaaaggacactgaaaggaaggttttactctttgagtcatttgtgattttatttgttttttgcagtggatctcttgagcctgtcagctgcatgtgatgccttggaccagcacaacctcaagcaaaatgaccagcccatggatatcctgcagattattaattgtttgaccactatttatgaccgcctggagcaagagcacaacaatttggtcaacgtccctctctgcgtggatatgtgtctgaactggctgctgaatgtttatgatacgtacgtatggcatgtttttatttcccgggctctgtcacaggaggcttagcgtacagaatggtgaagtgtaattagcattacaacagggccctggaagctgtggacctaatgctcttcctgtgataaatcatttttgcatttatgacttgaaaaatattttgataagctaggagttaagagccagaatgtagattgctctcagattagaaaacaaacaaaaccctgagacactcattttgcaaatagtggaatgagtcgacatatagcctttggttctttccctttctcgcccatggattttggaattcttccatgcacttcaggggtggcttcctctcactggcggccatggctgtgctcctggagatactggcacacctgtctccagatcagaatggtcttagctgatacttaggacacttttgcagaagattatgaattgataggccaaacaaaatgaaaacaagcccttaatacagcaaacttagcttctcaaactgagaacatttttcgttttcttttgttttttaataagattttatgaagtttcagtttggcgcctccattcatcactctctcttagagaacaattgtttgttttggattgcacacaagggagatatccccagttctgatttttttttttcttgagcttaatgaagacaattgaagaagggagcagaaggaattggtcttaattttgcctaaattcttcttagatctcaaaattattacatgcctcatttcaccaatcaagaacatactcccatttggaaatctgggaaggttttctgaaaagagttgcaaaacaactgttttgccttttacctttgttgtagacttctactaccttttgaactaaaatttatacctttttttctttcttattttgataaggtattgctttttaaaatttcaggaccacctgactattacattcatcatagtcatctaccaagtccttgaacatgtcggatttcaattgtgaactacgttcacattagttttgataagagtttgtattcaggtttcccctcaaatatattttggcactgttttctttgcagatgacatgtgaatgcattctgaatgtataacttccttctacctgactgaaaagtatttggtgacaattttaactccttgaagacctgagttgctgtataaagtggatttgttaaattttgatctaccttttcttaagagggagaaagataagaaaattttccagtgataggaatttgtttagtccattagtgcccaggatttctttttgactgagggatttaataaattttagtagctggaagttgagcatattgttcaccgaaaataaccgccattgggacctatcctttgtgattttgaagtgctaataggcgaattattctgaaatattttctcctttttctttttaccaatatctaagggccagtagctttccgtaataaaataagaagccaaaaaactattgaaagacactttttaactttaattttaggtttcggggtattatgtgaaggtctgttacataggtaaactcacgtcacgggggtttgttgtacagattatttcatcactcaggtattaacccatttatgcctagtgttccattattggaacactaagcttgtgggaattattcctatcctactgctcaaggtcatcgccaaggtctgattttcacaaaaagtaatatgcagcctccagcataaatgggttaagcgcagtacccaacagttgtcttttctgctcctctccctccttccaccctccaccctcaagaccccagtatctgttgttcccttgtgttcgtgagctctcatcatttagcttccacttagaagtgagaacatgcagtatttacttttctgtttctgcattagtttgctaaggataatagtctccagctaatccgtgttcaaaagacatgatctcattcttttttatagctgcatggtattccatagtgtatatgtaccatatttctcattgatgggcattcatattgattccatgtcttgaaagacattttctacaaaatggaaaacttttcattcttatttttcctttttttcccccatggataaaattagcttattaataaatttgttatgtgaaatgctttatttcagttttctatatgcaaatatagaaaatgctatgcaaataaaagcaatctatattaaaacactgatatagcaacaggttatttataaatttattttttagatcatatatttgaatgttgtttaatagagtatgatatttttcttacggagataaacatttatattctatattatgtgttatgtggcctgaagtaattaattttctttcaataaggggcaatctgatgaagatctgagcatttaagagggctgagcagttagttgctggtaatttttttggcttccatgaccaaagtaggtaatttgctttagtaaccaaagtagattggtgaagattagtaattcttctgcttaccaacttaaaccaaggtggctttccataggtgaatagaatttttttttcttaatttatgtagaacttttgcagttcaaataagggtttttaggaattgaaacttggtaaacattcagtggtcaagttggttgaatttccattgcattgtaggtcatcagtcaaagagataatgaatttggaaaagttcaaaacaatcttaataaaacagtggtcaatagagttcacacatcattgagcactttactcctttatttttccttttcaaggctttattcttaactagaagtgtttaccctctaggaaagggtcagtaattgttttctgctttgattcttcataataggggacgaacagggaggatccgtgtcctgtcttttaaaactggcatcatttccctgtgtaaagcacatttggaagacaagtacagatgtaagtcgtgtatattaatgctgtattcttttattaatgttggctaattaccctagttctagatgggaaatgacagactgttcttatttgacagcagattcctcatgtaagatgtagaactgcttttagagtgtcataaaatttggtttgtgccattccttgtcaaacattaaattgcaggcatttaagtagagaatgaggattagcttttccagtccaggtattattttacattacattgactgtgtctgaataaaacacatgttcctaggggataaagtctgattttctaacctctttctgtaagtcggaaaaataagtgtgaagatttaatctctgcacttgtctagtctttgggttcttatttaaagaataccatgtgacattcatgttcaagaaacattgtttattttataatcatcttactgcaagttgtactgacacatccaattccgtgacgtgactaacattttattatttgagagacagatagcttgctgtttcttaaaggatagatacgtaccaccctacagaatttccttttgattacgcattgggttcttctgcttaaaaactgtaaaaccaaattaaaagccaatgctagaggagtgatggttcagatgaccaagtgaccatccattcatattgtgaaaggctgcagttggttttccccttgaaatgcttataagcaatcttttcagtaggaatattaaacaaattcagcctagcttgtcttttctctcttcccctgaggcctagccacacatgtgaggagatgtgctaagcttcaggacaggcaggagataaaagccactctgtctcctactgatcatttctccttcaggagtaagccacaaaatacacaaaccattttggccctcacttttatgtagtttccacttgagttttctcatcctcagaacgagagaaaaataactgaacagcttttgttaaccattttaaaatgtatttcggatgagatgggatacctgtgtgcttttctcctttaaatattgtagttacttagtataggttaggttctaatctaccgtatatatggtatagtgacagcacattgtaaatataatattaaattgaataattgaggaagctttgagttggtgtttcgaataactactaagagggaacatgtttttaggttggtgaaacaaaaatattaaatgcaaaatgagatgtttgaaagtaactcataactttgaaaataaacacctaggtatgtatatcggagagcagataaaaagctgtgcgtacaatctcaatttttagtgccatcttaggtatcctgttaaaacatttaatttcctagagtttaaagtgtgcttatgggtacagaaagctttcttggatttactttttttgaggggcaacttctaggtgaatataaggtatgattaaaattttatatctgagaacaaaacataacattgcaagcattcagtatgttcattcattctgttacatatattgggcacctactatccaccgggtactgccattctactgtagatacttctggcacacaactgaccaagatatggttccttccctcaaggggatataagtctcctgccaaaaacgatagacacatattgaatcaatgccagcataacatgatgtgagctattaattagaaatacgcagccaggcgcagtagctcacacctgtaatcccagcacttagggaggccgaggtaggaggatcacttgaggtcaggagttcaagaccagcctggccatcatggtgaaacacgtctccagtaaaaatacaaaaattagctgggtgtgatggcatgtgcctgtaatcgcagctactcaggcggctgaggcaggagaatggcttgaacccgggaggcagaggttgcggtgagcagagatcgcaccactgcactgcagcctgggcgacagagcaagactccgtctcaaaaaacaacaacaacaacaacaaactatgcacagtatcctgtgggaacacatacatgatggactagaagctcagtgatcttatgactccataaagaagtcccaactgtggtacatttttgaatctctggtgtccaaggagggtggtgctttgggccagttatatgtctcttaatgctaaaacacttattttttgatgtagttacatcctatatacaataattcccaaggattatgttctggcttagaagaaatttaagtgtcgagggtacgtgtaagcttgcgcttcttgcagtgacacagtttatgtaaaagttatcacacttcatatatatacagtgatcattaacttgattcataaaaataataaatatccagattagcacaaattagaagtaaccccactctgtggaaatactggctactcttgagaattgctactggaattgagttggatgtcaggttctgctggcatccatgggtgctgtgttttgactgttgcaattttcttcttcctttgtagaccttttcaagcaagtggcaagttcaacaggattttgtgaccagcgcaggctgggcctccttctgcatgattctatccaaattccaagacagttgggtgaagttgcatcctttgggggcagtaacattgagccaagtgtccggagctgcttccaatttgtaagttattcaccttctaggtaacatatttattctttcatattttagaaattaattaaaaaacccacagagcttcgttttctcatattagctcttcagtaggcagtaggtatgggatttgggatatttggaacctctgtaagtaagcagcttctggaactctaggttttgggaaagaagacagtgctgaggaaggaaaagaaatctccatctgcagcagggaccccacagttattgaggtgctagaggggaagaagttcagcaagggaggaaataagtctctagccacagaaatcctatgtatataagaaaatggcctttgtaggcgagtctcttagtctctgagtcctttctctaattctatcattatagcctcctttcaatggctgttggtaaattgttagcacagctgtccttttttttaaaactgtcctttgtagctttgacattcccctattattccaaagtctagaggtgtatactctctgctaatgtccatcactgactgaacacactcttgtccgttctctttcctatcctgtcccattgctttttctctgtcgtagtcagtgccccagaaacaccctcttcttcccaaatgcctgagcactccactggtagacattcatcttgttctaatttttttttctctttccttttttttttttttttcttttttgagttgcagtctcgctctgtcacccaggctggagtgcagtggtgagatctctgctcactgcaacctccacctcccgggttcaagtgattctgctacctcagcctcccgagtagctgggattacaggcgcccaccgccaccccaagctaatttttgtatttttagtagagacagggtttcaccaggttggccaggctggtctcaaactcctgacctcaggtgatccacctgcctcgaactcccaaagtgctcggattacaggcgtaagccaccgtgcctggcctctaatttttattaggtagatagtgctacaatgaacatccttatcgtttagcttttgtctttgaagctttctttataggatcaattctcaggcgtgtgattgccagacaaaataatataaacattttttgtggcctttcttcaaaagttgttctaattgtaacgctatcagtattgaaggagtaagatgctttcggtatcacattattcacagtgttcttatgtttttgtttttggttttttcaagtgctaagagctgtttttcttatgtagggtttctcaatccattctaattctattaacaatggctgagatttacaaaatggaactagctgtagaactaactgggttatatctgaagtctttgaccacagactaggatgaaactatagaaggtttcctgggcagatcactgtgaatatttaggtgtttaaagcagtttgagtatttatttaatagttagttggatagatttaccggatgcacacataataagttcatttatgtaaagtgggatatactgtttgaattattttgccaaaattatggcaaattagttgtaaatgtaaaatgcatgtggagaaataaatatcttttcctcctcatacccaaaccttccaaaatgcagatagatgatcaatccaatcaatcatcaaaatgtagacacaagtaacttccatacaatgaatattaatggccacaggcaatctaggttcattttgattttttaaaatccaattataaaacaacttgccataaacgcgagttatttcctaatcttttggttgtgtgttttttttgttttgttttgttttgagatggagtctccctctgtcgcccaggctggagtgcaatggcgcgatctcggctcactgcaacctccgcctccctggttcaagcaattgtcatgcctcagcctcccgagtagctgggattacagggtgcctgccaccatgcctggctaattttttgtggagacagggtttcaccatgttggccaggctgagctcaaactcctgatctcaagcaatccacctgcctcggcctcccaaagtgctgggattacaggtcctaatcatttttcccctttagtcaagtctcagttactctttgagttctagtgaaacacacacacgtgttcatatatagggatatataaacatatgtgtgtgcattgtgacttgggttaaaggtaaggctcagtgatggtccctgctgcaaagtaaactaggctgtattcagggccagctggattctttgttttctcgcccgagtactgactcatcaggaagccaccaccatcctcactgcagcctctggccctcttggatttggttgtcaggataagcggtggccatacagaagctctgctttccctgggctgccccccttatcaggagaccaacctattccatttctgcctgctacatccttttgctggataacctcctactcccctaagcccatgtctctggtttggttacatttctgtctctgtaataacaactctgtattctcagtctcaaagctttgaattcagtccatccttgcatatttgttgaatgcctcctggttggccagccagtctccaagctctttgaaatgtgaaatgtgttttgttttgttttcagaaggggtctaacttcgtcacccaggctggagtgcagtggcacgatcacagctcattgcagcctcgacctctgggctcaagtgatcctcccacctcagcctcctgagtagctgggactacaggcatggaccgccacgcctggcatttttttggtgtatgtgtgtgtgtgtgcgtgtgtgtgtgtgtgtgtgtgtgtgtgtgtgtgtgtgtgtacagggtctctcgccatgttgcctaggctggtctcgagctcttgggctcaagctgtccacccacctcagcctcccaaaatgttgggagtacaggcgtgagccacggcatccagccttgaaatgttttctatgagactggggggaaatcagtcaagatatgaatggtggtaacaggtggcttttgattttctctgtactatttttattttctgagttttcttctttgaacatttataattagaaaaaaaattagtaaagtgctgcctctttttttagggaaagaaacatgttttgtttgattgctttccattgccattcttacattgtttccaggccttctcatcattgcactggcttcctagcaagcctccacttcacactccagtccttttcattggtcttattgccctcatactagttttagagaaaagcatttcccatatgatgccgtccttgaaaatgtcagtatctttctgttgtctagtgaacaaatcctaattcctctatttaactctcagacctttcctactctggtttcataaccacccatagtttgctttcactatcatgaaacagcttctccttaccatttgtacctattatgcttataaataatattgttaccattgctactaacaaaactttgttcacatgaattctctcatttaatcctcaccaagtctttgaggggaacagaatagtcaggctttggagattttgcttttattattgtttaagtggatgaataatttatttgcgcccttaaagtccctcagctggtggaagggtttgattcctagtccagtatgcccaccgccacatttactacctcattcccaaatatgtagtttctgatacttctgctctccagcttcccaaggccaaacaacagctacttttcctgagtcctggatagaataagaaaaggtataacaagacaggggacccttgagggggaagaggaattagtttgaagtgctggcaaatgtagtatttctaatcagatgctagtaaattccatatgtatggcgaggctttcattacttagatttggggagcctctcagcgttttagcaatttgcaatcaggttgaatggatccattgtaaatacttaggaatacttaggaatccacgtcctggccctggcatgcttttcctcggccaggtgcactggcggtcaccttgcctttcattgtgccacgtgcataaaaatacaatgtttgctgtagggaaagataacaggagtgaaaatgtcctctgccctttgtttgaagtataggaccttcagaatgaggctgggctggttccttcagcaagcttgtgctcaaaggctgctatttctaccagcctgaggtaaacggtaataaagtacttgtttatcctacaagtgcattccttgcattgcagatttgatttcctttgatttcttgtcaccacctggaaaccttactttgtttcaggttggtacagttagaaaggtactgaatcttctgattcagacaagggcccagtagtggcaagaagagaggtacgtgtttgtgtgccacactctctggattatctattaaaggttttctcatatccctccccactaaccacttagaaaaggaaatcacctatcaggtctaaatgtaaaattttgcttatttaaaaatcactataggtcttccaaggaattatccattaagccaggaaatgaagtcacatccatggatatgaaaaaggaatagtcactgtaaatttatggctttgacagtggtatcttcgtagatactaaatgaggcaacaggatatgtttccacattaatagcatattgcagtcaacacatttactgggaaattgactcattttggtagtgatagaagtaaagttttgcaacgagtttaagagatacagctgtaattaatatattgccagcttgttcctttctcatattccatggaaacagccctgttgagagattagattgatttttacgaccttagtaaggccaagcctgccctggcagtgagtcacatagactgcctgaaggaaccttgaggattttctgcacctctcctttttcagatgagaaaacaggcccacagtggcacaatgaatctagtctacatcgtgcaatttacatcatgttatggcttcaaccagttcggagactagattgaaatgacagagtgttaatgtgtcaatgtgatcccctatatgaattttagattgtaatagaatgagatagataaataaacacccctcccccaaaacacatacatgcacacacacccatctttattgaaaatactctaatcccaacatagctgtttagtctatcttcagataaaaccaagtatcacttttaggtgggaaaactatacagtcatgtgctgaagaatgacgttttggtcaatgacaggccatatatactatggtggtcccataagatcaacgtaagaagagattataatggaactgaaaaattcgcattactttgtgacactgtagccattgtaacatcatagcacgaagaattatttcacaaacctgcactgccagtcatttaacaggtaaaaaagtatgttttaaaatatttttaattattatggacacataatagtactcatttatgggttacatgtgatattttgatacaagcatacaatgtgtagggtaacacaatcagagtaattggggtgtccatcatctcaaacattcatcatttctctggtaggaacattcccatttcactcttttagttattttgaaatatacaataaattattgttgccatgcatggtagcacgcacctgtaggaccagcgtttcaggaggctgaggtgggaggatcacttgcgcccaggaattcaaggctgtaatgcacaacaattgcacctgtgaatagtcactacactccaacatggacagcatagtgagaccctatctgtaaaaagatttaaaaatatattgattactatagtggccttattgtgctaccaaacactagatcatatttcttcttactgtatttttgtacccattaaccatcccttttttatcccccgatcttcactacatttcccagactctggtagtcatgattttactctatctccatgagttcaatttttttttttttttttttttttagctcccacacatgagtgagaacatgggatacttgtctttctgtgtgtggctgatctcaacataacgtcttccggttccgtacatgttgctgcaaataatgggatttcattttttatggctgaataatattccattatgtgtttatagtacattttctttatgcattcatccactgatgggcgcttaggttgattctatatcttggctattgtgaacaatgctgcagtcaacatgggagtgcagatatctttttgtggtttcgattttgtagtatcttcttcagtaaacattttaaggactttattgtttagataacgtcaagtataccaactttatattcaatatgcttcacctatgagagctggagtgtcaaaatctgtttattttacatctgttttctgcctcctgttgtacttagtattccaaatgagtaagttgcttttccatctatcttctgaatttctctatttgtatgacaaaaatgaataccatctatgcacagttgttgtaataatgtagaatgatatgaaaatgagaataaattacagtctcaactgttgagaacaagtatttctctgtgttagaaacattcccaattctactcttttagttattttgaaatatacaatgtattattgttgccatgcatggtggcatgcccctgtagtcccagctactcaggagactgaggtgggaggatcagtaacacataaatgagaaagcattccagaatatctggagaagtgactggcagagtggttaagtgcataggctttgaaaccgaactgtgcctgagtccaaatctgagctctgctatttgctggctgtgtgactgtggacacatttcttaaccttcctggcccctgaactcctggaggtgattgtgaggattaaatgaaccaatagaagcaaagcacttaagagctgtagtggatacatagaaggtgcccagtgaatgttagctatgattatctaaagtgtgttgtggcatgaaaatatcctgccaatgttaacagttgcttttatctataacaaaacatcatctgtggattgcattttagagattctggagattctgtttctctgcaaatgttaaaatgccatatcaggagacttttggctggttagacagcattccccgggtcaactgattacttttttttttttttttttttttttttttttttttttttttttttttttgagacagagtctcgctctgttgccaggctggagtccagtggtgccatctcggcacactgcaacctccacctcccaggttcaagtgattctcctgcctcagcctcccaagtagctgggactacaggcacgtgccaccacgcccagctaatttttgtatttttaatagagaaggtttcaccatgttggccaggatggtctcaatctcttgaccttgtgatccgcccacctcagcctcccaaagtgctgggattacaggcatgagccatcacacctggccgattccattttattaatagattttccatcctgaaagtaactcctaaaaaccctccttcacttaggtttcctttggctttttgtgtattaatcagactgtgggccctttggttccatagacattccttttacaccccttttggacggatgaatactcactagtaactaagtaattagtaagagttactacaatttggtatttataaagaggtggcctttcccagaattgaaggtagaccctaatagtccaatcagccttccatagagatagctggctgccatgaaaagctgagagatatcaccgacctcttactgggcctgctcatgaacagttagttaaaattcctgcaattttcagaaaagacccttatcagagtattatcagtattgtcttaagtttaatattggtttccagttgttatttttaaaaattttaagctaccgtgggttaagctttatgatgatctgtttaagtggtttgtttgattaacttctctattggagtaatggatgttttcttcaccagaattttgaagataggtttgtgttgtagttgaaacctgttttgtttatacacttactgctaaggaaaagcacatgtcattttgttttccatcttcatccttctaaagtagcacttcattgttatgaccaaatctttctttcttccttccttcctctcaccctgtcttttccttccttccttcctgccctccctcccgcctctcttcctttcctctcctctcctttcctttctttctttcttttctcttttctttcgttctctctctctccctccctccctctctctgtccccttctccttccctccttccttcctttcttccttccatttctatcacccctaaaattccatcatgctgtatcatctcactaagtcccaatctctggaaaccacagctctgttttctgttcctgtaattttgccttttcctgaactggattttaaaggattgtaggaggcagtagtggaagagctaactttatatcttgttcttttacataatgcgccctgatccacacttgggaaagtatattccatggtacctatagacagatatatgtgctttaccatgtatatgtgaaacttttctaatttaactttcctgttaaattagaactcggtagcataaattaatactgttgagtatacttagggatttgcatagatttaaaattgtgcatatgttccctagggccatggcgttaattggtttattagtcaggtggagtgcagagcctgaggtcaggacagttgtccttgaacatggaaatgaagagtggataatcaccatgtgttattgtttgggctgattttatctttaatgggtgattcagagtcctgattaatatttagagcagtgactgctggcctcctacctgctcattatcttcagaactttaaataaaatacttgatttctacccaagatggtagttatgggaagccttttacttcttcttgtctcacaaagacaactcttgacctctcaatccttaaacaaaaagttctgcttctgcgcatgtggggactcttaaactcattttcatgcctggagattcacatttagggatctaggaaaagcacatctaggcagagtcgatgaggagatgctttaagaaccgtgacaaggacaggaaggaaatcaattttgcgttaggtttgtatttttagagaaaacgaatcctggggaacttttcacactcattactattgacattaataccattgtcctgtccctttcacagttactaaaatcactcttgcccaccctcctgccttgcccacaacctattcccatgaaggggtgacttgggagaaataacggtttccaaccaacgttttattttggaaacatttcaagcacaaagagtagttgaaaggatagtctaaagaacactcatctgtgtcatacatctgttcaatccatggttgcttttcgctctacttacctcctccaccctctcagctctgtttatgtatgtgtctgtctgtgtacatacacacacaaacacattttcccctatgccatttaaaagtaaaggagcatcacaacataaacccctaaacacttcaccatacaccattttcttaaaggatgacattctctaacataactgcaatgctatcgttacacacaaatttaacagcaatccagcaataccctctgatatgcagtccacactgaactttccccagtgccccagaattgttccttatagccactgttttcttccagcatctagtcaaggtttttgtctgtcatgtctctgtaccttcatttagttttgaacagtctcccagcattttgttttcctttcatgacattgacttttttggtagggggacagagtctcgctctgtcacccaggctggagtgcagtggcgcaatctcggctcactgcaacctctgcttcccgagttcatgtgactctccacctcagcctcaggagtagctgggattacaggcatgcaccaccacacccggctgatttttgtatttttagtagagacagggtttcaccacgttggccaggctggtcttgaactcctgacctcaggtgatccacctgcctcggcctcccaaagtactggaattacaggtatcagccaccacgccgggctgacgttgacatttttgaagagttcagaccagttctcttgaagaatgtcccatactctgggcttttctgatggtttccttgtgattagattaatgttaacattttttggccaaaagacgataagatgatgctctgtacctaccactgtatcacaatctggaggaacaaaataacattttgttcctattggtatcactaagaatgttaaggtggtgtctacaagatactttccttgtaaaatatccttttccctttgtaatgagaaagtaattttttgatattttgacatattataatatccattccttaaccttttaccctatggttttagcatttatggatgatccttgtctaattcagttataatattggtggttgcataatggtggctttctaattctaccatactttctgcatgtattagaccattttcttatgtaaagaagagcttctacctctcccccgtctattcatgaatatcactgtggacatccaaggtggttctgagtgtacaaagaatgatatctctctttactgaactgccattggatactatttttgtcttggaattgtttaaaatggcagtgtatggaattgaaagtcctttctccagagagccacataaacagatgtctaataaatacatttccatattaaccaatccttttatgggaacaacacattgacataattaaaacacgtaacatgaaaactgtgctgaattgagaagctcatagagttttgtttcttttttttcctttttgccacttcaatatatatggacccgcacctgtcagtccaggtagctcatacatgccgtagcatctaatggtacgagggacatgtaatgctgaaaagaagggggaaaggagttgatcagatgagatataagtatgcatttatcagtgttgtggggtattcacttgcaccttccattggctctcgcagccatgttatcggcatataattcagttgaagatttatattcacctggaaattgtcctaagtgggccttgcttacttagctatcagactctagtactttcaaacaaattaaagattcaaaagattttggggatcgccttgctttttcccataggaaatcacttttgtcctgtctttttaagactattttaagcatatatttcagtattaaaatcgtagataatcttaagctgtttccttaacctctttgggccttttcttatctgtaacataaagttaaaacaggttatctcaaaagttacttatccctaagtgtctttgattctatgctaaatgttataaaggccgaaagggaaatggattattgtacttatttcaaagcttggccatgatcagcaaagtcttacctgatcttccgggtaacaactcttgtatcagagctataagatatagaaaacagtcttgtacatagagtgtggcatttcacatgagaccaagtgttctctgaatggaaacacacactaagagcaagatgtgaaaaaccattgtgtacaacctcatgtaaatgatcccttgcgtccgtacactatagtttcctcagtaactcaaaggtaaaacccaagtatcttgtgtctaagaggatcaaaatgtcaccttccttctgttttatttgttacatgcaggttttgtatagttttatagagtctttttatcactcatttgattttcataaaaattgggattgtttggaagaagagtcattaatattctttacagcttgttcttgttcctccttttatgttctctgctggtgcagacttctctcttatgtaaaatattccactgatgcccttggtagatttagaggttgttaaagaaattgtaataacagatcagggaacagtcagggactgcctgtcctatactgtctgaccctgactaaccgttctccttgtagttttaaatctttgtgtacagactgtaattcaaaaaacagtttttataaatttaaattcagcaaatctttccaaatgctaaggctttttataacgagggctagaaaagttgagttgtcagctattaatgccaatacctattaacaatggcaatgacattgaaatgattttttggatttatgaagggaacatgttactaatgaaaatagcaaatgaaaatggccactgtattagtccgttttcacgctgctgataaagacatacctgagatggggcaatttacaaaagagagagggtcattggacttaacagttccacgtggctggggaggcctcacaatcatggcagaaggcaaggaggagcaagtcacaacttacctggatggcagcaggcaaaaaaagagcttgtgcagagaaactcccgtttttaaaaccatcagatagtgtgagactcattcactatcacgagaacggcgcaggaaagaccaacccccataagtcaatcacctcccaccaggctcctcccacgacatgtgggaattgtgggagttataattcaagatgagatttgggtggggacacagccaaaccatatcagccacaaaggagagattaccctttttaaaaatctgtggtttgcccacaatgttttccataaatttacctttttctgtcaataaaaatgtttaggaattctatttatggatatgtatgtatttaatatttgcatatttagttcttattttttctctaaatggttatgacctgtactaagtaaaatcaaaacacacacacacacacacacacatacacattgtactagcagacctgctttaccttgcttgggataattatctgccatgattaaataaataaatttctgcaactgtttatcctggaatacactgcatagagttgtcagtttgagaagcaacttgatttcaaatctgagtctacaattttagcgtgtttccttgtgacttctagtttggggcttttaatttcccttttgctctctctaccctcagtttatgaacgagtgtggcatttcggcagttgaataggcctatggtagcctcccagtttctgtgttgtagaggatagttgccggcttattaaatgcccttgcaggactctcagggaagtctgttgtttagtgaatagtgatgaatcaatgtggatttcttagttttgacaagtgaaccatatggttatgtaagatgttaacattggggcagggtttctcaaccttggtgctactgatgctttggcccgaatcattctagttctttgttgtgggaagctgccctgtgtgctgctggatgttttgcagaatcctggcctctatctactaaatgctagtagcaccccctccccgccctccccctcccccccccccccccccccccgcccagttgtgacaaccaaaaatgtctcccgtaaaagataccaggatgaaatcactttttgtcagtcccaaactaactagagccagggcagcatgaaaggaggagggttcatggttacatgcctgagataaagactgtctcaaggactttctaaaatcgccccacaagaaattcctctgttaggactgcagcagtgcacgtaatatgctctcaaaagaacatctgcccagtaatggcatccccactaataaactgacaccagttctggcgttgagcatctgaaacgaactatgtttccaagcagcttatgtaaacttctgtttttaccaataaaagtttccctctacagtctcctcttcagatgcatcttgggttgtaatcctcatttctaattccaaaataaatttaacatatttggcgatgtttttctctgatgttttttggtcgacactccaaacattgttatatttcctctggggtacggcatcatttccggttgagaaccaccgacctagagaaaagctatctgcctgtgcagttcctttcaagggccccaagtgtgaattttgtgtatacctatattttaagccagatcattctgtacataccttctaagtccagatgaagtctgttagccttttatgtgtgataccatcacatagaaaccaacacaaggacatttactgtaatcgataaaggaaattttggacagtttgagaaagtaacttattttgtcttctgctctttataaaatctttacaagtgtatgtttttgctcttcaggatgactaggcagctttttaaaattctgacttcatacagattttataatcttccttttatttcttgcgatcatattgcagttgaattcccacccactgttcaattcagcagattttaacagagactccagaagtatagttcctgtctttaattaatctgcaatttaggaaagaaattaaggaggtatcgttctgtattgtttccaggatggtggtttcttgttatctgagaattactgggcacagtctcttgcccaatgtttacttctctatatagagttgacccttgaaaaacatagatttgaactgtgtgggtccacttataagtggatcgttttcaaccaaatgcgtatcgaaaatgcagtactcaagagatgtgaaacctgcggatatgcgttcagctgggcctactgtgggacttgcgtatgcgtggattttgctgtatctcaacagcaaaatccccgtgggagtggggctgcggcgggccaggaagcaacccctagcatatactgagggatgactgtactaattattgtagtttattaagtgttcacatggttttcacaaacctcacaattgaaatgccaattgccttctcctaaaaaatacaatgtacgtgttcatggtagctgggatgcagggcttgctgagaaatacttaattgcatttcttctgtagccatgaattgattttattaccttgagagaaaaatgagtattcaggtggacctcctggcaggcggttggcccttcagtgtccaaggatttatagaaagcacaacatcaaagaaatccaaaagttcttcggaaccccagcaactctcctacctccaaacttgccatgtaatgcccttttaaacttattatattgataggtaaatcggtttgctagaaattccagatattgagaattctttgtctgtgtaccttgttatatttgtataaaggtgatatttgtatgaagccaccctccagtgtgctgtaacagagcaatagtaatgacaactgattccttcccctagcttttctgttatggatagttgctggcaggtgaggaccaacagaaaaagaggagaaacccaacataattccaaactgtgaccatcataatggaaggagctgtgatagctttgctttctgtgtgtgcatgacatagaaggggaaaatggagttattgccaaaacaacagcaaaagcaaaacaaagccaacaaacaaaacaaaacccagggctaaatgacctttccaagagattttgcttgcatggcttgaaactggtgtttagagatgaggacaaggtcacccttgatactgagaggggattatatctgagacttatatgtatctcaacaaataatggtacttacaaagattatctcagtccagtgaatgccatcatacttatcttttgaccttaataacttcctgctattccaatctatccctatatatttttttctggaatgatcgaaatgtaattttagctgggtttaattctagttctgttaggtctttacagaagcttgcctggcttttaattctttccttcttcattgccagacaaaaggagagggaatataccactaggatacagagtagtttgtcataaaaatgaaagattgaaacagaatgagaacgtgaatccccgtaccttgtcttcagtctgtcagttggcgtaggtgagcagttttaaaagagccaacatgatggatcttgcatcttaggggctagaaatttgagaatgttcaacctttaagcatagaagaatctatagttttttgaaagagtagaacattctacagcctcccttggtaattcacactaatgctttaacaactttcagcatcaggaaattcttccatatgagctacagcctaaattcttcatgctgcttaagtctgtttcttcttgttctgtcctcagtggagagatcgaacagctggtcacaggcccctatgcgagagccattcacataattgaaaactgttattaaatcgccccttcagaagtcactcttgcttgttctctctctctctctctctctctctctctctctctctctctctctctctctctctctctctctctctctctgagaatctgggaagattccagagctgattaacatgttgctttactgatgaccttctcagcttttaatatgttaacgtgctctaagaattttaagaggcagatataatgtgcactgtttctttcattaatttgaccttctcgtgaagcattttgctggacgattgatctgctggacatactgggaaacactgactcagagattttagttgagtaggaaccgtgtgtgagcctacggtacagaacaaaagaaagtaatccagttacactgtctggagaaatagaggtacattctccgcaatcatatttgaagaatagttttctaaatgacaatggcaaactaagccgtgtcatatgaagaagaagtaaaaagaataggaatgaagaggcatggacagataagacagctctggtaaaatatttaaagggctgttcaaagaccaagaacttctgggttgctggtcagatggataataataatgacaataacaatagcaaacatgattcttgctatgtgtcagacacggttccaattgcctttcatttgctgactcacgtaatcataaaataactctatgaggtaggcactattaatatttccagtttgtagcagagaaaaagtaagacacagagagataaagttattttcctaaggtcacacagccagtgagtggtgaactccagtggtttaactctggaacttctatatgctgtgctgatggatttcagctcaatgtgatgcagcacttttgacaggggtatctggacacaggtgttcaggatcaccttctaaggatgtttcccagctctctcacatgggtggtgtagtggctgtaagcacacactggcatgggtaagagtttggactcgatgaatgctgagtttggactcagtgaatcctgaaagtcttacagctctgtggtgccatgccaaaaggatgaatggacttgcatgatctttttcatttttagattgcataattctttataaacttttttttccacaaagtacctctgtgatggaactctacacagagaaaagtgctcagcaacagctttttaaaatttaacttgtaagttcaggggtacctgtctaggtttcttatgaggtaaacttgtgtcatgggggtttgttgtacagattattttgtcacccaagtattaagcctaatacccattagttattttcctgatcttctccctcctcccaccctccatcctctgataagccacagtgtgtgtttttcccctctatctgcccatgtgttctcatcatttaactcccacttataagtgaaaacatgcaatacttggttttctgttcctgcattagtttgctaaggataatggcctccagctccatccatgttcctgcaaagaacatgatctcattcttttttctggctccggagtattccagggtgtatatgtaccacgttttctttattcagtcttccattggtgggcatttagattgattctaggtctttggtaaacagtagcatttgatcggaagtttgaactgataccattttgcagctaggaaatccaaagttaaacagtttattatagtgttgctaaatttagaattaggggtaatgactggagtgctgttgaggtgatcagtgttataagccaaatgacctgtcagtctaaaccctcctgcctttctatctgaaatgtggatatgtcctttattaggaaaccacattacaagagaagcaacttggctttgcagctcaaatacccatgacttgtgtgatactaagtattcccatgtcatatattcaactgaaattggctgtggaataagtaatgcttcttggttcttggcaaaagcaaaggagaatcatctctggagaaagcacttttattctaggctcaagcttttatttatctctagaaaatattggtaaggtcagtttagtacgtggtaaaaaaaaaaaacaaaaaacatattaagcacacaagaaatcaaggtggaaaaagaaagaaatcaaggtgaatgagaaccagaagaaatagcaaaccatagaagcagacctacgataacatcatattccagaattattagacagattattttcttaattgtgtttatgcagttagaaaaataaaaaacaacattgaaaaatatctacagggaaccacaaacctgagaagttaccttaaaaatgaccaagtagtatttctagatgtcaaaagtacaataatcaaaatttaaaactgtatgggtttacagcagaccggcaagagaaatggatacccagacagtaaggcagaaggaattaataagaatgaagcacagaaggatgttttaaaaagatgtggggcagagaggggggaactagggaagtcctgttcagagaaatatagattgaagaagagtaacatttatgtaacagagttctgaaagtagaatggagagggaatggagaagaggcactatttgttgagagaatgacggagaagattccacagctgattaaagactctaaatcacaggtttaagaagtccagtgaatcctaagcagtctaaatcaaatcctagaaacagcacaagatagaaaacagatagattatctttattttttttattttatttttattatactttaagttttagggtacatgtgcacaatgtgcaggttagttacatatgtatacatgtgccatgctggtgtgctgcacccactaactcgtcatctagcattaggtatatctcctaatgctatccctcccccctccccccaccccacaacagtccccagagtgtgatgttccccttcctatgtccatgtgttctcattgttccattcccacctatgagtgagaacatgcggtgtttggttttttgtccttgcgatagtttactgagaatgatgatttccaatttcatccatgtccctacaaaggacatgaactcatccttttttatggctgcatagtattccatggtgtatatgtgccacattttcttaatccagtctatcattgttgggcatttgggttggttccaagtctttgctattgtgaatagtgccgcaataaacatacgtgtgcatgtgtctttatagcagcatgatttatagtcctttgggtatatacccagtaatgggatggctgggtcaaatggtatttctagttctagatccctgaggaatcgccacactgacttccacaatggttgaactagtttacagtcccaccaacagtgtaaaagtgttcctatttctccacatcctctccagcacctgttgtttcctgactttttaatgattgccattctaactggtgtgagatggtatctcattgtggttttgatttgcatttctctgatggccagtgatggtgagcattttttcatgtgttttttgcaaaggagcaacagtcatctttactattgacttctcagcagcaacagagatagacgaaagtggagtaatatttcagtattcaaaaacaaaataaaaacaagaccccaaaacctttcaatcaaaaattttatacttgggccaggcgcagtggctcacgcctgttatcccagcactttgggaggccgaggcgggtggatcattttaagtcaggagttcgagacctgcctagtcaacatggtgaaaccccatctctactaaaaatacaaaaagtagccgggtggggtggcgtgtgcccatggtcccagctacttgggaggctgaggcatgagaatcacttgaacccaggaggcggagattgcaggagccgagatcacgccactgcactccagcctgggcaatagagatagagtcagtctcaaaaaaaaaaaaaattgtatttaatgaagataactatcaggaatatggattttttttttaaaaaaaggaggtattttcagacaaacagagcttgagaaatgcaccaccaacagctaaaggaaattctaagggacatatttcaggcagaactaatcccagatggaagatttgagatgaaagaaagcaatgaagagcaaaaaagtagtcaatatataggtcaatctatctaataatataaaaaattaaaacaatcctatagggttgaaaaaaacaaggtataattaaaattcatgaatatagtaacatataaatcaaatggtggtattttgagattgttgagatcattgtcctgtctgggatgaattgtatttcttacatttagactttgaaagagagagaaatagagaggcagacagaatcaacagggcatcatgaaaacagcgctaagccaggaggtttggattctattatcagctctgctgctagctgtatggcctttgaaaagctccttttctggtctacaaaatcagtttgcttgtctgttagatgaggctttggaaccagatgaattttaaagcccctcattatgattctatgagaaacagattctctagaaaaaaaaatcagttgtccccctcctttgaaattttatcagtaaacacctgcatttcacttctggctaacttttatgtatcagttcaaaaattaaagctaaataaagtctcgctcaggtgtgtagtttgcttacctttctcgtttgttggttttgttttcttttcttgtcatctagtagccaaaaagagtaatggcagtttaccaaagccttaggagtgggtagctctttggatatcagggagcatttgcagaaacaagctgtgaaaagccagcctagctttgcaaccattgttctttctatcttttctgtttaacttattaatcgaactgatatacacctcctttgccatcttgccttctttcctttcatccttttgccctccttctctctccctcctgtctttgcaggctaataataagccagagatcgaagcggccctcttcctagactggatgagactggaaccccagtccatggtgtggctgcccgtcctgcacagagtggctgctgcagaaactgccaagcatcaggccaaatgtaacatctgcaaagagtgtccaatcattggattcaggtattaggaaccaaaaaaaaaatgtcatttttttctcatcatttttcacctttttatgacttgatcttttatctcctgtgccagttgctgttagttcgtaccgtctccaaagtgggagagaaggtgattgggctggaacatcgatcattcctgtcaccctcctgatcgctaggttattttggtggatctcacttattaggctggtgtcccttaccaccttcactcttcagctcttcggagccacatttttggttgagcaggccaaagtgcgtgtcttcacggaggtattacagatgaactgtacctcctccttcctggaaccaaaacatttttaccatctttcctttttcacggtctttcctgtttatagaaacttcccaagaatcagttataaaactgagagatgattctattctgggaggaaccataatagtagctcagtctctcattcactttgcaccatttttttttctcccttaagtaacaagaattgttttcagcatcttagaacttgcttctttatctgtgaatctgattacattctttgtatagtatcccagtgaacttctaaaggaataaaaagtaggcaagtaaatggaagattcacaaagcagctaaaaaacaaccagtccttatacatttagaagtgaaagagataggaaacgtagcaggttattctgatagtcttaaaatatcatggaaaacaaggccaaataaatctttagccctgctgacctgtttggggagacaggatttttttttaaatgaattaatctcacttaacattaatcctaaatcctaattctgaaactgcgatgtccttaaatgtgtgaatcaacatcaaggtttctatagtgatgaataagccacaaagttgtaaactagctctatggtctatgcctgtgcagaatccacttagcagcaaagtaaacactcttttccagttacgtgtgaactggttttgttactttattttctaataactaccttgtactgttgcgtgctttttattcatagtgcttttttacttttggtgtttattgttccatagtcatgctgtttacaaagaggttttacaaaaacttttagaggtttctgaagcctagatagacaacagtgagtaggtactgcttgcaaaggtcaccttctttccttcccggtttcttggcaggtaaaaatgataccatgggggtggggagtggggaagggaagccacagtgactgcattagatttctaagctaccttttctctgcttccttagctagtgggctttgtatacaagggaaatttttataaaataaagaagaagaatgccttggaggatctgaaagagcactttcaccttcaattcttttgcccttatcatattatattattttaggacccagcacttctcattcctcctgtccccctcttgaaagatggctggaatctaaaaaagatagctttccttcccacttccccatatgtgacataagaaatatgtttatttgaattggctaaggttcttatctgagaaagcaaaaggcaggagagtatgaaacaaagaatatcgcattctgataatggaggaaatgtaccaactagtatttacagattataaattcttccatctaatccaaatttcatgttctcttggggcttcagttatcatttgtaggtaatggggtgagagatttctgaagagatagagataaaagagttcattcgagtaactgtttgaagatgaatcgtatcagtcaattagaaaacattattaaagcgagacttgttttaattgaaagttcttgttcacatttcttttgtcttgtgaaattgctttatcttgacaatgttttgaaaataattgcttcagaaaacttttgtcccatgatgggtaaggggcatgcacagcgtaagtctgtcgctcctggaagttcttttaaatttgagtatttggttttcaaaagactggaaattttccagtaccttcctacttaatctcaaagagttcctagtggagtttaaataaaagctgagtttttcttccctccttccatatgtttataggataatctttctgccaaaatgttttggtactgtaggagaggcaccggaaaaatctggaggcagaaagttaatcacttaccttgtgggactaatgaacattgctttctgtttctcaaattagaacgtggtagaaggtttattaaagagtgttctttgggaatttgattcgaagaaatacatacgtgtttgtttttgctctttatcaggtacaggagtctaaagcactttaattatgacatctgccaaagctgctttttttctggtcgagttgcaaaaggccataaaatgcactatcccatggtggaatattgcactccggtaagtttgacgccagcctgacgtgagagttagttcacctgggataaatttcagttttgtacaatactgcagatcatgtataatgctgtgatttgtcacttccccagatgttccccagctaaagtggctctcaactgtaggcttcaggatttaccctatccctggtgcctaggggagtgcctggcacatatggaacatgatagaccctcaataaatattgttggatgaataaatagggttttcattctgtgtgcatggttgtattgaagacgttttcacgtttattttgcacagccttagaggttgtgtggggcgatcttatggccatgaggcatgttgagtatgggggatggttctaggttcccccaaattcataaactaccacttttaatcaatgttgctcacctattatctgtcctgtatactagtgacattttaaaaatccattttatatgctaacacttactaaatgctaggcatttaccttttaaactaccctgtgtaaaataagtactatgatttttatcccctctatacagatgaggaccctgaggtcctgaggttaaataatttactcaaggttctataagtaagagttgaagccatctcctaagatgttattttaggaaaatgttaagtggccaatagaactgtgaaaaatcactagggaaatggcaaggatgtagacttggtggccagacagacctgagtacaaatctgcctaagaattaaagacaggctcctctcaggtttgttttttctaaaataaacctgtccctgttgactgtagagccacccttcgtgtttctcttctctttctttaattcttacagtctcctcttctctaaactttgcatgcttgctattcaagatacggtctgttgactaatcatcatatgtctattggcattaccttggtctttattagaaatgtgaaaccacaggccccaactcctgatgctctaaatcaaaacccacattttagcgagatctgcagctggttcccatacacaacaaagtatgagaagctctgctttagagcatctctctcttccatcatcagagtgatcctcccagatatttgcctgtctcacttttattcctcttatagagatggtcagtgattgagaatgtaccatgctatgaatagaccgaaatttagtgggtgaagcatgctatcattttgtactaagtagtttttaaaataccataaagtgtggtaaaatttaatgtcacctttttgaccttaagacctataaactaccatttattgagtagcctagtaagcttgtatgtttcttttatttatcataacaacgtgttgaggtgttgttgctcccattttactgatgatcagagcctctgagaagtaaataactcagccaaattagtacatgccaggcctggtttcagagccccatttgtctgattccaaagcctttgctcacaaccacaacactctccttaattacaaaacaagtgtcatggggcagaagactggagtggtcattagttttgaaatcatcctgtcctaaatctgatctcaccatgatctcccttttagactacatcaggagaagatgttcgagactttgccaaggtactaaaaaacaaatttcgaaccaaaaggtattttgcgaagcatccccgaatgggctacctgccagtgcagactgtcttagagggggacaacatggaaacgtgagtagtagcaaaagcagaacacactcttgtttgatgtatatttgaactcctctcagctgaacaccctccttcactcccaaatgcaaacagtctcttctatttctttctttttatttacattagctgaaaagagaaaaataagctgatgtccagttgccactttcccacgtcacttgacaatttctttttccaaaagttaaactttatctcacagggggaaaaaaaaaaaaaaaccacaacacaatacagccactaattgccttacaagccttataagaaatatgggactgtttacaaatgagtgattccagtatttcattttgattttcctctctcacaaatcagtaaatgtgtgtctttttgtatctcattgtgtggtcatatctagtcacttgtttctactcaaaagaaaatatagtcacaggaaactacttcacagtaagtagtaatgattctcaagatcaaaggggacgtcttcacctcttttcaacctgctcctcttttttgccttaactctgatggcagtcacacaactgtgtgtttttcttttaattcactttacaccttggtttggctattgctttccatggttcatacttaattggctggattttatttattttgacctttcagtaaatttttttgcggctgagtttgcgtgtgtctccttcaccacctcattttttgttttgcagtcccgttactctgatcaacttctggccagtagattctgcgtgagtactttttttgctgaagggtgctgctaccaccaacacattcgctcgcttggttctcttttgttctgtttatttgtttgttttcttttgttttgttttgttttatggacatattaattccccttccttcatttcagtttttttttttcttttcttgatgagactttgaaagtaccatctacacagatcaggagaatcagagtgggttttttggttcctccaccaggtgaaattcaaaccagcagaaatcctggcttgaattcaaattataatcaaagaagttattggagttttagctgtattcctgggagacatgtttatatatttcttcatataaaagcaaggaagaagcttctgattacataataacattctttagccatatttcttgagattcgatgctttttagaatctttagggtctgttataagtggactattaaaaatcagcagaattcgttttaaagtatgatgctgagtttggttgaataattttaatgaggtgtgcggactgtttatcaggttatgccatgctatttgactaatcattatatacaagggtttctaaattttgaactaaactcactttgctctcctctccaagctaaatattcagctcataaacaattatacatttgctctaggaggaaagtatttctttgttattactattggtgtgtattaataatactgagcttagataccagcagatgatttatctcagagtttataatgctagaaaactcttttttggggcctgtgatttctatattagcaaacaaagtgcctattttaaaactacattatgtagggttgttataacaaacttttggtatttcaaagtatgctttattaaaatatttattgaaaatcagacagctctgttatggataaaggggaaatgaccaattcggaagataagcttgtgtaagaattcaatttctttttattaaatcttttttattgttccaccatataatttaatctaaactagatccttttttaaaaaccctgtcgtgataaatgcatattattaattgaggtttattttcagtctttaataggcctaaaggaagtggaaggctatgctttcctttttaaaacttcgttattgcgccccttaattttgagatatggtagctataagtagtatattatctgatttatttaatcatcatgcttaaagaacttagggagttatttaggttcagttatgtcctctgcctcttggaaattgtgtttcctaacccaggtagtctgttatagaagttacaaccgttcataaataagaaacttttaaagagttgatacactacagtttcagcttgattggatcctgataagggaatggatttactctatgtggaaataagtttaaccgagtaagaaatccaaacgacaaatatgctaaagaacagttgttacaaatacatagataaaagtagcaccaaataataaacaaagagtaattaatagtccttgaaaggcaaaaaggagctacacgtaagctaatgagaaaaacattatgacaatcagattaacttattttaagtagaagattttgtctgtcttaaacgttgaaagactttaaaattaataacatcttttatttaaaaatattttctaacaactaaaacacacctcccaatttgcctttttatgaagagttggttagattattcagaaatagtgggaagttttaattttgaggaagaaaacaaatctagcagactgaagtctgtgttttctttaatagcagtaattgtatttaaagtatttattcataggattataaatactgtataaaatatattacaaagccatcctattcaggcataagagccaggtcctaacgtgtttcattttgcaagacttgtatctaatgttaacaaatcctatgatgattacaatatttgatccatttgatatggatcacagaatttgaaagtttccagagatacagaccgtttggttttccttagactaaactcttatttgcttgtgtttgtcatattactttaaaactaaagctaacataggcctttacgttgtctgtccataagtgagccagtcaaacgatattctttgagcgattctgcattgaaacctaaatgaatgtcagcttttaattaatagagttttcataaaagagaaggtggtggtgggtgggatggaattgaccaagtaggtcattaactcttatagtaagtaatccttctgggtatatggttttgtgtttaggaagtgggaagcggggaacagtattattaccttcttttggaagtgttttagaaggctttgcacttagttttgtttgtggactaagtggctttgtattttcactaattcttggtttttaaatgattcatctctgaccagtactcccttttggctcattttctggtttaataaatgtctcttttagtgtatattttttaagatttctggttattgtaagttcttgtgcttatgcatgctgtgataggcgccactgatattaataagaaaaataacatggaattatccttgaggcaaagaattaaagctctgtataagattttctgtataaaatggtattaaagtattttggatttatatgcctacttttcttggtgtacttatgctccaaggtcttaggctttcattcttgtacacacttccaggatagcaactattacaagggaaaacactactaatgtattttccctgatggtaggctttttgcttattaaaaaaatatgtaattgaaagactggtctgttccaaaagatagttcttataatacaaataatccaagtattaatttatcttgatctgcagtgaagatttcaaaacagaccttagcatttttctaataatgggctatgccagggttctagaagattaacagattaactctccaaaactatagtgaagtttcacatggaaatctttggatctgcttattaaattgagtagtcatcgttttgtttcctcttgacaatttaaacgtctttataactcatttcaatttgattatgattacacttgacctagatgacattggtttcataaataagacctttctctctcagggaagaattccatttccctagttatttgctatagtgtgtcgtaattatcttactgtagtatattaagaaatatgaatttctggcacattttctaatgcaagcttagctactggtaactgcatctttttcttttttaatgtaagaagaaacaaacacattctccttagtgtttcaaccaagtccttcaacgctacttggacactgggctaaaccagggtcctctctgaattacattatcgttgacttttggatttatgcctttacctaagggctttctgtgtcagcagagaaatggaagagaccttttgtgctattccaattaaaagaaaaagtccaagcctaaactggttttcagaacagatggttttttttcctaaggttaatccaaaagatactataaaaacttcaaggataattaatagatcagatatgaaaggatgaaaaaatgttaaccctaccagaattctagcctatggagataagaaaagataggtgtttatatacaaaaagcatatagactattcctgctaatgatctcctcttattttctcacctatgttttagcacacagtatctctaagaaatatttcagatatcatgacgttctatgaaatttagtcattcttttttaaaacctcacaatataatccagggtcattctattttgtgctagaaattagtggtatagtcttgctgctgaattggaagatacatttcttctttacaaaattgcatagatcaagacatcttgatacatggagttttaagaagtcttgtactagagtagcctctttgaagctaaaataattgtaagtatctaggcagatatacagctttgatccaataagaagatagcctataaatggcgcaggtgtaaactatttaaaattttaaaccacatagggctaacacaatttcggaattataggatgtgagaaattacaaagtaggaggacaaaatgcttcctagaaactgtctcccccaaccttttctacgatgggaattttccagagaagattttggcctctcttcatggcttttaataaaagcagaagtatgagaaatcatctctcaatcctggattttaaaatacttgataatatttaagatataggagcaactaaatgtatacattatccatagaattagaataaaagcattctaggccatgtgtataacataactgtgtggtgggttttttctccattaatggatggtatctgtgactaatcacattttctgccttataggcctgcctcgtcccctcagctttcacacgatgatactcattcacgcattgaacattatgctagcaggtatgagactagttgtatgccaggcaaatattgattgaaataactaaccaaggaaagctaacctatgatattttaaacaaatcttttctttttttccccaaacttgtctgattcctactaatcaacttgccctctaacgtgcatgccgttccactgcatgttgtttttggtcaccaacaagagcattagtccagaataatcttccctaaccctggcttttaaacatttccggtagccttgctatgtttttttatactgagcacatttactaaattggcttacaaatagtttaacctccttagaaaactgctagaccagacattcatatatgaaaaaatgatactatattatatggagaatatgaaagcatcagctttccgtttgtgtatttattttacatgatatgctgtaaagaagagaataattaattttcctaatccttggacttttctgtctcaccttctttgtgtttgagatgatttttatacctaaaaactgaattactaattttaaaatattttatgcttgttaaatccgtaagagtttggttaacttttttagttgtaaaaaaacaaacaaacaaacaaacaaaaaaccccctgtataattgcctgaggtgaagaagattttaaaggtaaaaattggtggcagaatgtttagagagcttactgtgcatccatcctttgtcaatattctaactgctggacatgtttaccaatcgtgaaaagcattagctagctgtgtaagtctgtcatcagtggaaagtagtaattgtcctaaaagacaaggggtagtgtaaggtagggagtgcacttattgttagggaagcttttcttctgaaaacaaagacctgttctcagtgaaagcaagactgatctgtagggggaaaacagtgaaatataactttccttagaatttctatcataaatgtagtgctactaactagctgtggtctaccacacactgcctcaaatggttaagccaacacacacatcctttaatttgaaggattcctttctcttcttgccatgatttatcctttagttttcaggaatgttcgattaggtcttgaatagattctaagacgtcacataagttttaatgagcttttacgttttttatcaggctagcagaaatggaaaacagcaatggatcttatctaaatgatagcatctctcctaatgagagcatgtaagtatcccatctctttttacaaaatgttcctgacaatgaaattgctttgagggatttagaggtaggatagcacaggatataggaattagcatcatattcatttgatcttttaaggagccattcatttacttttttcctttaattcttaatgccctggcatggaatgagctcatccaaattctggcattattagtattcagagtagcaaaaatagtttgccttactcttatttgaacttatttcataccatatgattacaaattgcagagtcccaagtatttatagtaatgcttaatctttgaccaaacctgccagatatttaaagggataggatattaattttaaagtcatggctaagtactattttctccactcatggggagtggaaacgtgatcttggtatagcatggctattcacatatggtaggttagttgggcattttccttcagaaatccaaagaagtagatttttgtgatttagcatcttcacaagataaataaagtgaggcaatcttatgaagagtttccagaggagaagtaccaattcaggttgcaggttgttagcaggatgataagccaaccctgttaaactttaaggacggagatagagcggtgctaagagcagcagggaacacagctatggcagggaaacaggcttcattatagagtgagggcagtgttcacaatacagagcacaaaggaacattgccatgaaccaagtaaatgctgaccggggcttgaggtagagagagcagacattgaagcaaatatgaaggaaaaaataaggatttgccaagtgaataaataacataaagagaagaaatctagtcaaagtattacgatgcctttttagtttgataaagtaaggatatctcacccatcttggagaatatagacaaagggaagaatggtaaatttatcatatgtagttggtgtggcaacacaaagtcatgctcagatgagaaaagaaccttcataaggattaggccaaaagaaatagtatcaaagtggcatatatataactagttattgaagacatgagaataaataatctcatctggtacataaacgatcaagctaataataaagaatcaagtcaaccctcagtcatttgtatatgacttacttccttcaaacaaacaaacaaaaaagcctttccccaaccataactgtgatgccttatctttcttagctatgggaaaaagtattaatggtactaatatataagatacttcaacagtaaaatgtgtggccaaagaatcagccaaatgtaaatagcttgtgcttctttggctcactgattttggtattagaagctctagcacattcagattaattcgagttgtatctacgtaacagtggctgtcattcattgactgcctaagagaacaggaagaaaagtgtagttacaactctaggttataattaaacatgggaagttctagcagtacaacttcagaatttggaatgagtgtgataaattaggtggtaaaactgcttttgttttattttaaaataagctttagcttattctgaggacataaaatccattttgactcaatgttggatggcaaaaactcatggcattttaggggcaggtttggggaagtggtttggtggattggttgacttcacttaaatgtgtgtttttaatacccaataattatttttagtcagcttttcacatctaaaccaggtaactggcttgataaacaaaaataattcaaatgagaaggactttttcctaaatttctgatatttttcaacttaagtgggtatggagaggagaatattagcgtatcatcttaatgatatctaaccagaaacaatgagctttagcctgtcattacggacagaagaaaattcttataacttggaggtaaacaggcctttccggagcttggagcaatgcattcagaaaaaagtttgtcctgtgtattagagagttcctagtttccaggaaagattgtagctgcctccccaaatagaagcctttttgcctccttttcccgcaagattagtccttaaaaccattatgtataaatttaaaaataaataaaacttgtatttaaaaaaactctgccccgaggaatgagatgttcagtcttcttttaatcagtcaccttaatgtcttttttccccttaattttcgttcttctgtctaaacaataactgaatgaaacaatcatgtatctccagtttaattgttgttgtcattctgcctcaatgacttatataagttaaaactgacttactgaagcaatactttttggttacattgccttccacttaataaaatatttcctctgttacttttagagctgcaaggtattttttcctactcagtacaacaatagcgtgggttagtgaacagattatcttgacaggcttggtggccaaagcattatacagccattattatatcttttaatattttttagctattgactaacatcaacgtagagtcccagtatttctgtaattctgcctttcatttatccgtgtaaataggccaatcaatttcatttgaaaatctgagcaagaaaacactttgaattggtaccagtagaatggtagatcacaacctcagcagtatcaaaaggtctttagaagcaggaaaaaaggtctaattaattgttaagagcaaataaatgtttctattttcaaatacactcctgagtccctaacccccaaagcaaaataagggggggaaaaaaccaaaacctttgattttattttccagagatgatgaacatttgttaatccagcattactgccaaagtttgaaccaggactcccccctgagccagcctcgtagtcctgcccagatcttgatttccttagagagtgaggaaagaggggagctagagagaatcctagcagatcttgaggaagaaaacaggtgagttttctttctagctttgtcattggtatgcagagtgcatacacttgcacacatagaaaagtgccaggaatcttcacttagagtcattttatgtctaattgttttctaaaataatctgtttagctccatttgcagattctctctctcttttttttttttgttatctgaaagaagacaatggatgcaatagtatgatgaagaactcatattttaggtgtgaaggagttaatgctgatggtggtatttgacttgttgcatgtgtctccaaggctttgattttatatttcagaatagaatttaagaaaaaagtaggttatttaattttatgattatatgattttttttacatgtgtttggccatattatctacctcaaacatttaagaaagtagggttattggcttggtcatattgggaaaccaattgtttcatcttatttttcatcatcaaatgcagaaattattatttatgctcaccatcatagcaggttagtgagacaattccaattgtcagccatcacctgtaaaagacagtcatgtaaaaatagcagaaattgtagaagagaaaaaggctaaagaactctcataatgactgcagggaggacaaagatgtaaacatctggggtactgtattgtgtcaggataatgcaaatcattggactttcagttctgtattacatttattatgtcacaggtcccttggtttaaaaagtcttctcacatgatcacttctaactcacaatgtgccttcttcagacagatgccaccaagcaaggatttaaagtagatgttgctcagatttgtgggtcttaagtactttcatctctttggttgagcccaaggcaccaaaagctcttaacgtaggcaacgcagtgtgtctgagatcagtgccctcgggagtatgccacttcaggatgaaaaaacaaactgccactcttccattgcttcctgctgccactgcgagccttctagctcttaacaccttttacctatggccatagctccttatctggttggcttccctttagtctctttcccacccttgcaataaatcctccatactgactctacttgtacatcttgccagaaccaagacccatcatggcattcccctttcactggatttctgcatgtagaaaaaaatcaagcttcttagtggggcgttcaaacccttccacaatattctcttgacttgctttttctatgccatcttcttttgttctccctgtgttctggctatgctgttgtagctagtatttctgaatacatcctgctctcatctacctttggggtcaagctcaagcttgagtctcagcctaactgctaacctctaacccaccactgccgtatctgacaaaggaatcccacctatcctccatcacactgctcaaaataactttccccatggagccctgctagatccctgcagttggaagaaatctgtcttttgcctctattcccagagcactttggacctttctcagaaaattccttgacagttttcctttttatcagttattaccagtgcctctctttaatgagctagtgtgtgtctttggggcatggactgtatcttaatcatcttcatatcctccagagtacttagcatggtttgaatatttaatggctactcaggaaatgtttgctaaaaacctgaaaatacagcaagaacatcacatgagtaccatccacgagataatattgaactttttttgttgttttaatgatagctttatttttggccgtacttttgagatcatttgtcagtgaagaccatggtagagaaaacatttctactttattgagaataatcagtaatatccatttatgttaaatctgtaattattgtaggggtcaaagtcaaatcggaataaaaagttggaactgacactgtaaatagaatttgatgttaccaaggagtaaatatatttttgaagtatatgatcgtgtaatatatcttttgagctcattggtcaagagccctgcctcgtttgtggttagcatagtctttctccgtaccattgcacccgggtcaaagaatgtttgtaaagagtactgataactatcatttatttatcattttatcattttgagtgcacttttacatattttagatcatttaatcttcttacaaacgctatggagaagagactgtcgcctttctgtgaatgagacacaggttcttagaggttcacacagcttgccccagatttcccagtcagccagtggtagaactgaattgaaatccagatttttctgactctaaataggcaactctgccttcaaccagataataaagaagagtaagtctctgtgaatgtcatttacatagaattgcggcatattccccagaatgtgccttaacttgagggactatctatgaggactgagtgtcccggaataaacctgttcatctacttgtggcacagcgataaccgctttaccctggaagatatccaagaccattctccaagaatgggatggtttgttctctaaaagaacaaaaaacataacaccaggcctacttagagctccaaaatgaggactctggggttgatgcaaatctttgtgtaagttaccttgaccttcacgaaatgatcaggatgagcttccttcattgtcccttcattttgtcctatttgaccttctaccaaattccaaagaaatgtctccacagagttcccttcctgaaaacagcccgtgtgttttctttgatctgccctgtcctgtcttcttgcagttctgcgcaaggagcttcagagccctagatttgccttcgctacccttgaattcagtgttgcttaaggagcctttaatttgccatttcctgttgagaaaacccaggaattctttagatgccctctctgtgcatgtctagctggctatgtcctaagtcagcattgggctacgcaatctgacaaatacgagcatacttttagagaaaataagaaagtatatttaaaattgagattgccccaagtcctttggatgtgtacttattgatctgttaatatatatattttatgttcctttagctgtgatttatctccaaataacagcaaaagagagaggcctggagagccccattcctgactagatatttattaaattccattaattgttcttattcatgacacctccctacaaccccctagaaaaacagaggatggctgtttgagaagtgtctcagaggtatcttatctctgcctttagaattccatttctcctggttgttgcacatagtattcaataaatatttgttgaatgcattaatgaataaatgaattgaagctgaatttattttaattgtagcatacatgcatgcacttttgactaaagttcttttacaaacctaatttcgtagagaaaagcctttcaaagactttgttttctgcttgcttttcaaaattctcccctttttcaaactgccttgattagcaccaggcatggctttgtcataaatttagaatgttaagaacccgttttccaaatcacaggcactgtatgtatcccacattggtgttctctgattcttggttgatgccacagagataaggctaaagctctgagtaaaagctaaatctgactgagtttttcccatagtgcctcccataagtttggatgactaatggtgttagtgagatatctaatctttaatatttcgcttctgcatcatatttctccctcattaccacatataattcagatacatctttatttggcaaagagccactggatcttgggtttttgccccattgtgtgtccttagcattgcagactcaaggtttacttttttttcttgcgttgattaaagccttcagtctcctgacttaagcctgtagtgttcaaatacagagatgtatttgtctctgcactgtctaaataaaccaagacttgctctgaaattcaaggtatgatcctagcaatgaaaaggtagcctttctgagagacaaagacattgtcgttctactacctgcagagcaaattgattagattgttctcaagtcaacaaggtggctaaatattaacctaattcaccataaagtctaaagttaaagttgttagtagatgttatataacacgagggaactctgtagattcttaatacctactcaggacctttcatatgtcttgttgggcagtaagaccttatgaagccaaaatttgagttttctctttttcctttaaattcctccagtgattgtgcaagattattattgttacagtcaaagaagttctagatcagttactgataccactgaattaaagtagctggaaatcatgatcccgttgctttactttgtaattgacttgatgactttggacctagtctagtagctatcaatcttcatagctacgggaaatctttattcaatgttctttcattaggtctttgtgcaagtctccaatgatggtgaaaagatggccaaaatgaagggaatctgaagaggttaggaatgggcattcctatggaatataaacaaaggtgtcagggtgaggaatggcagagtttgtttgagggaaactgcagttgtattaccttttttaagaaggcaaagaatgagaggagatgaggctgaccaggtcagcaagggcaggtcgggaagggtgtggtacccactgcagagttgctgcctccgtgcctagtctagggagcaactcaagggtgtgatccaggagtcaggccatgatattgacatgaatatacgccacacaggcagctgtgcggagggtaactttgaaaagagcgatgctggaacgaggaaatcaagctggggggagtcacatgggagcccaggaaagagatgattagagccttaagtaaggtgatagaaatgaagtagacaggctgatctgagtgatatttcgggggaggatagagctgtttgattcggtagttctgtgggactagggtatgaaggaatgattcccagggctggtaactacaaaacaagatgatagtagttatttgcagctgggactgataattcaggaggagttgcagcaggtccatcctttaatgcagcagtgtttattagaggtccttcctgaagggctgagtagctggaaggtgataaatgaggtatggaagaggtcgagttgaggtcctggtgacatctccatgtgtaaatgtctgacagtctgagagatagaactctgatgcttgtagaaaggatataagcctgagatattaggactgtgagtcgccagctcacaggtggtagttgaaaccgtgagaatgaatttatatatcccgggagcatgtagcagaaggagaacactggatttggtagaactccggaagatgtgaacattaaagtgtgtatttaattacttttatttttagtagagaatacatgtatattattatacaaaatccaaagggttcaaaaagacatatagagaaaagtgaatccttctccaaccttctcccctggctgtggtgtttccagctctggaggctgccatctttcttggtttcttgtgtttccttccaaacatgctctctacatatgcaaatatttgcaaacatatttatggttgttggggttacttcacacagtgtcgtgcagtgttcactctggttttctctttttacttaaaaatctctaattttcacatgctggagaaatgtgccagaagaagaggagggcagagcttgggaatgatgggagcattttcccacaggaggcaggagagagaagggttagggaactaaagtatgggaggaggcgtgaccttgaatgagaggaaggactgcctctgaagacaaagtggtaggtaaggaatttagggtaaggaagggaggaaagaagcataatggaatgaatgttaaaatgtccagtagacatcactggaaataattcaagactgattcctacggctgttcccacatgtttttaaagttggagtggagaggaaagcgtggtatatgatacatttaacgaaactaggcattcaagttacttggtgtattagtccattttcatacggggcaatttacaaagaaaaagaggtttaatggactcacagttccgtgtggctgggaaggcctcacaatcatggcagaaggtgaaggaggaggaaaggcatgtcttacacggtggcaggcaagagagcatgtgcaggagaactgccctttttaaaaccatcagatctcatgagagttactatcacaaaaacagcatgggaaaaccccacccccatgattcagttacctcccactgggttcctcccatgatatgtgcggattatgagagctataattcaagatcagatttgggtggagatccagccaaactatatcatttggtgacatgggccccaaaacaaagggctacagagcccttcttgagacaaagggagctagtttgatcacagaaatcagaaagccaagaccttttatggcaaggatgaataagagctgaagggcatacatgccacatttaagaagctgtgtaagaatggggtcaaccatctcagctctactcaggcagggaggacaggaacatggtagaagtggaatcaccattattcacagactcagtttctaactagcagggccagtgtaactaaatttccttcagtttatccaaagttaattgaagtctgaggggactgattcatagtatgcagttcatggcagtgaatggataacccagaatgaaagtttatttctccctttatcctaattatctctctttttaactgccttgtattaaaatgttatcaaggttgccttaaagcttttttaggaggagacagcatctggtttaagtgcaaatactagatctattaaaatgaggaatatattcattttttcggcacacagcatcctgtgtcttagaatccagtgtcttaggaatcacaataaaaatcaaattgtgttctggtgagcctagaatcttggcatctaaaattggatgtttgtgaggactgcttcatactacaaaaaaattgaagcacccctctggcgattagaatattcacatcttacaagtacagctgccatctccctagaacatgctggataagagtttatgttcttacaatccaatttcccttttttttttttttttttttttagatttttcatgaagaccctcatcctcctgttggccttcatttgccaattgtccctctacagtagaattgattatggtcatgagtttctttagctactttccaggcctgaggatgtaattctgttcaattctgcagatagttactgagtgcttaatgtaattttaaaattatgagactacaaagatgaataagccttggttcttaccctcatggagctcaaaatttattttaaaaaagttaaaatagaaacaactacttatatcctactgttacaagtgctctgggggcacagaggtgaatgatttattctatcagagggagtagagaggcctttacaaagagagtttaagagttgaagactgaatgggagttttccagtctgagagatgggggaaggatgagttttccagactggtggaccagtgagtaatgtgtggcttggaatgaggagaataagagggcagtgggatggtaggtggggactactgtttaaaggactttgtgcatcatactaaggagtttgggttttatcctataagcaggtgaacagtgatggctttttgacgggggggaggattgagaaaaataactgacctggcagaaagctaaagccatgaagattggtagaagcacagtggaatagtccattaaaagatgccaggttcttaactaaggatgtcttaggcaagtgaagaaggggatggagaaattagaaggtcactgaatgaatgagaccaagggaaaatggagagggggaggcatctggtgttacggaaagttttaatttgggaactgggaaatgatcattgaaaaacaaacaaaagcaacctagtgcacccaggaaaaactcctgatttgcaaagggttagtgcatggagagaaagagctacgtatcagacatactgaattctatttgcccaaggacatttcaagtggaaatttcctatgttgattttacgtattcagttttcagaaaggattctttaaaaagtcatagcaatacaattcctgcaatataaataatagatcaatgaacatcatagggattagcatagttgatttgactaagcttcagattcagtttgagcttccctgtagccagggagataataggaaacaaagatttgtctgtctcttaatattgaattaaagaagcacgcagcatcctaaagaaacatcattgttttcctggctctacgtaataataataataacaaaaatagctgtcctttgagtgattgctatggacaggaactgttctgagtacatatgaactcctatttaatccttaaaacaaccctatgaaagagaggctgtttccagaggattacgtggcacagagtattaaggacacttcatatggccagcaagtaataggacctgtattcaaacttgggtggtggtcctgaactcttaagcagcgttacacttgaagtgattattggctagtgtccttatcaacatttttataacaaatcccaagggaaattatatgtggctgtttctcatggcctttgataattgtggaaagcttaacattaaaacaccaaagatagggtgacagttctccaaggataaaggtcactgttgcctaaaatgtattctgcagaataccactgagatactctgagaaaaaaaggattccaaggacagtaaaactttgaaagcactcatactggaaagtcatcattacgttagcatttgcactgaggagtttggaagtgaagaaacctgattagctttgtctaacctcatgttgctcccacttacttgacctcgagcccaactgcaatgttatatggaacacactttggtaaagaaattcaagtctgaagtaaactttgaaaaccagtctaggagatagcatagttgactctctactgtagttgttgagaagcctatccgttgtgtctctgggaacatcagaagataaagctataacaggtgcccacgtaggaagcctggatttttcgcacaaaagtaacttttcatatgctctagtggtgaagcagttaccctgtagacccagaagccagaatgatttagtctgaaaaatctaaagataggtattaaattaactctcatgatcatagaaaattctttgcaccatttttgtagaatatcccaccgaataacttggcttttcacccaaaccaccaagaaaaattgccaccagtgacttgatgcaattaacttgctatcgggagttctttcttgtgaaatgattgaactttgaaagatgtttaccaaagacagcacctttagcttcatcacaattactgtggaatctttctttgtaagtagttagatgcaaaggccagttgttgcttgaggcctctcctggattgtgattttaaagtgtatcatcaacacatgggaagatatttctccctctttatcttatgacagaaatgcaggtatagctttcatctcaaagtaagattaaggtataagttacaaagatgtgtagctactatatggtcctgtgtaatgctacttgaggaaggctgttcctttcctggcactgaaattttagagcttgcataatcagtatatcaacctcgtgtggcttggtgcttagcaagtttcagcttctagagcccatggctaatggagccatccaggagaatgttggagagataggtctgaagccttagaagagaagtcttgattaaggagtaatgagttgcgggaaggggtcatggttgtggcggagatggaagcctggggagaggacagagacctcctaggaagagagtttgtgtaagaagaagaccaaggacctcctgatgtacttgattgtaattgggcatgagcagcccagttagaaatggtttcctgttggtattacatatgtacatggatggcttctgcagatggctaaactcacccattttatttttttactatcttaatagttaaaatatgaccttttcttgtgtctccaaattctgagttaccttatggtgctagtctgtctgttgtaactacaagtcataagtaaatccatatgattcttttcctgtaatttcctggtaaatcaaggcgataatttcaaagataaaaatctgtatttttagctttagcagtgagcatgattcccagtctttttgccttcgagtaaggtttgtttccatggtggaagtaaacaatatcccacactctagaatgtgagctcttcaagggtaagggacagtgtcctacatatatctttatctccacagcactgggtacataaatgtgtcataaaaatgaatgggtaaatatcctttggagtttttctgttacttgatgggtttttggggttgattttcaggtatctcccttgtttttctcatttcttacattattttctttcccaaaatcccttaatatacctgtttagtttgtgatgtcattttccattagactgaaaccatccaagttgtttaggctaacccagacttaagcattttctgggcttatttttggactctttttaaaactcatcatctgaaaatatttaatgtccacacggataattctgaagacatgtgcataccatttttcttttatgtacatgggttaaaccttgatttttccatagtaggagaaagcattataagattttattgttttcactggggtaatatcttttgtgctataagaaataaaattttgaatctagaacttagttttttataagacctttattgagatataattctcgtaccataggagttacccatttacagtgtattagtcactgattattagttaataggttaaccagtattagtaatcactggttattaattacagagttgtgcaaccatcagcgcacaattttagaacatttttatcaccccccaaaagaaatcccatccccattttcaagtcactcctcgtttctcctgcaactactcttttcagccctagcagtagacaatccctgatctactttctgtctctatggatttgcttattctggactgttaatgtaaatgaaataatacaatataaagtcttttgtgactggcttctttcacatagcgtaatcttttaaaatggtatctatattatagcccgtattagtatttcattctttctttaatgctgagtaacatttcattgtatggatataccacattttttaatctattcattacttgatggacatttgggctatttctacttattgtctgttatggataatgcagctatgaacattcatgtacaagtaccggtaattattttaaagaagttattctgggctgggcatggtggctcacacctgtaaacccaacactttggcaggctgaggtgggaggatcacttgagaccaagaatttgagaccagcctgggcaacatggggagataccgtctctacaatttttttttttaattagccaggcatggtggctcatgcctgtagtcccaactactcaagaggctggggctggaggatcacttgagcccaggaattcaaggttacagtgagctatgattacaccactgcactccagcctgggtgacagagcaaggccctgtctcaaaaaaagaaaaaaaaaaaaaagattctatagtttctgtcattgtaatagaggaggccataggatcatatatggcaagagtatatagcagtgcatgccagggagtgaaaaataggccatcaaattgaagttactgggagaacttaagactaagtctaactacgcatgagggattgaagccgggacacacaaagcttaaaattatgattcttctagagactgttacggctttttgctgaccacagacaatgaaagtttgatattttgctgtatttgtctgaaaatggaaacacacttttcccaatggcagtattcctgaggactagagttcttcacctctaaaacctctccaatcctagtttttccttttggctgatgatgaccagccactgccatttttgtcttaggttttgttagtctgtcttatttccagttataagtggttaaaatttcttatgaattcttcttgtgttgaacttttgattaatacatttagtctatagacagtaatgaattagcatctgatcaggaatttgtgaaaaacatctcagtcattaaagattaagaaactgaagccaattaatattgtcatgttctgtctcttggaacttgagcaagatacagatctacgtgtcaatgacatatccagaaaatagactccacctagatacattaaccctgtacccttggtccacatattttatttcagcaatgatccatggacatattataatttgacagtttcatcacatacctagcgtattgggtcaaatcaaggaaatctcatcctagtgatcttaactcagtgatttcattttgcccagatgttcagctgtgataaactttactaaggcacagatgatggatgatacacaataattccaaaatttgggggtggctacaatgtggctaggggctagaactcaggtatctacaggacaaatactgagtgattagtcactttctaagcgctagatatgcatatgttctgccaagctcagtaggtctaagtagattgcttccatttcagataattaagtgctttctttttataggaagtttttagcacatctgaggttctaaatccaaaaagtaaataatatatagagaaagaagtaataacaataataatagtaaccaacatttattgaacacagtatgggctgggcatggttcaaagaaagtttgacatatagaatgtcgaccatactggcttaataatcctcataactgaattagtgcttaagtcagttgcccagcctcagcaagcagcagaggcaagtaagtcataaatcaagatcttctgaatccaagaccatctctcaagccttgttctaattctctcctcagccatggatggtgaaaggcaccacaaaggcagcgtgtcaaaaagtggcattgttcaacctttcccctgatggggcaaagcttttatttttttcctttacgttctttgacatctgttttaaaatgcagatatcactagaagaaatgacaactttattataaaatcccagtaaaatgtaaatgtcttatataaaacctttatactgagcaaatttcagtaggaaagggcttggaagtaaggctctgaatgttttaaagggggacagtgctaagaaatgattagaaacaagagcctggaggggtcctgccatttttactgttttgcttaaggctgacctaaaatatgcatagtcttacttctcaccctgtgagcttatccttattaatgtctttttccacctagtttaggggtatttttgaatttgtgtttgataaagatgtctaaagctgtactgtaaaattttattgtcacttttttttttaaatggagtctccctctgttacccagcttggagtgcagtggcatgatcatggctcactgcagcctcaacctcccagactcaagcggtcctcccaccccagcctcctcctcctgagtagctgagactacaggcatgtgtcacgacatatggctaatttttttcaatttttttgtaaagatggtgggggtgtctccctatgttgcccaggctggtcttgaactcctgagctcaagtgatcctcccacctcaacctcccaaagtgctgggattacaggtgtgagccattgcactgagctttattgtaatttcaagggctcaatgcaatttccagtttttaaagttcatcttgcttgcagaatttgtctttcatttaaaaaaaaactgctgattggctacatttatagctgctgtaatagttctgtatgatttactacatttgcctgaatttagattggtggatatgatttagctgcttttaatattatatgagggtaaagccagatttctttggatctattccttttagatggcaatctttgtagttgttctactttacaaaataatccctgtgtgtgctcatgctttggtatacagttaaatgtatgatactgttaagaaaacattgatcactggaaagtgaccttcatttctttatttcataaatatcattatacaactatataactacacgtagtagggaagctccatttaaagagtagatgacttacactgaaatcatttgacctttgtaaattagtttaaattacacagagattgttgtaatgttctttatcatacataatagttacgattgctagagaggcactcataaatcattgctaaaagggccagctgctttcatgttttcagcaggttgagttaagggaacaagccttgccaatttgattaatctcttatgtccattagttggttgggaagtttttttgagtgtaaatttgtatgtagacaacagagtttatattctttatgacataaaattaatcagatatatctacatatttgtagaatggggggattcttagctctatagagaataagaaatactggatggaagactttttttaggatgactggctacaggaagaaattgtagtgacagaagccatgtgtattgaatttgaattaatgttccttagggagctaccagagaaatataatttacaagataatcaagaacgtaaatagattctctgtggagtcgttgtctgatcactgacatatattcatctgtattgaaatgacttcatgactacattctaacaattagagaatcattaggggtgagatgtacgtgtataccttcaagaaaagcaaaatatgtattggtaataattgacagctgttaaaacgagtgcattgtgtacttgttaaacattagaggctgggcatgttggctcacacctgtaatcccagcactttgggaggccgaggcaggcggatcacgaggtcaggagatggagaccatcctggctaacacggtgaaaccctgtctctactaaaaatacaaaaaaaaaaagccgggcgtggtggcgggcacctgtagtcccagtgactctggaggctgaggcaggagaatgtgaacccaggaggcagagcttgcagtgagctgagatcgcaccactgcactccagcatgggcgacagagcgagattccgtctcaaaaaataaaaaataaaaaaataaaaaaaaaacattagaataacttaccttggaacagtaactctgagggaaccttgatcatttatgagaatgatctcccctacgttaatactgcatcaaaactaacattatggtatacctcaaaaagtattggcatagatgtttttaaatataagaaaattcaaatgcgtaattgataagggctaaatggctcaatttcccaacccctaacaaaaatatgccctaacacagctctgtgactatgactgcatttattagaaaacatttagtaaaaatcatctctagttcaaaccctccagcatcagttcttcttgataattctcatgaacatttagaaataccttaaaagagaattcagactcaaatcaaaaaaccttatttcatttggttgcaggccaagatacctcttttaaccatttctggcttttagaatccttatcatgacagcttgtcctatctcagagcttcaggaggaaaaactagtccctcaaaatcaagtttgctattgagcttaataagaggtttctgtatgtcatatgtttgtttagaagaaaagcacttgttcgactcatttaatcctggcctgatgaattaaggcttgaattaatactgagggaaccttgactatacatctacaaaatcaatgtgtcctggtaggcttctgattaagataacattagctcttgcttgaaggcatctttctctgctcctaccatttatccagtggtagataatatatggagtgaaaaatgaaaaagacatagctgggctttaaagcaagatgaacatctctgtgaaccagaaatgtgaaagaaaaaaaaaaaagtaagtggggctaaattagtgggctttcagctcgtgctgtagtaacagggattaaaattctccttacaaggtagtggcccaaagccaggattactatttgaaatcagagccccacaaaaacacacctagagagagacacatacacacttacacttaaaagcaacatgaaaagaaacagtttgctgcaagggtctacagcttatatgcagctatggccctaatgcatagagccgagggaagaggcaaagattcgcagttgggaaagagagcatcacagccttgaaaccaggacctgaaccaatctacctactgcctggcaatgaaatgagtgatatctctgtatcactcagtgtaggagctgcaaactaccaacagatgtggctctaaactctaagcccctgggtatggctgggagaagccataaaaccacctgagagagagataatgagtttaaaaagagaggaaaatattaaagtacacacacatgagaataatagaaaacatacacatgcatatgtatgcacatgcaaaacatcccttgcaaaatttgtctccaaatcacgatccaaaatacatgaagaaatgggatagcaccccccacccaagttaaacatcaaaaagtgaattaggctgggaacagtggctcacacctgtaatcctatcactttgggaggccaaggtgggaggactgcttgtgcccaggtgtttgagactagccagggcaatgtagtgaggtgccatctttacaaaaaataatttaaaatatattagccaggagtggtggtacatgcctgtagtcccaactactcaggaggctgagataggaggatcgcttgagcccaggaggatgaggctgcattgagccataattgtgccactgcactccatcctgggcaacagagtgagaccctatctcaaaaaaaaaaaaagatgaattaattctagaagaaagcaaaataatacactagtacaacaaagatttttacttacatttaagatgctcagaccaggtgcagtggctcacgcctgtaatcccagcactctgggaggctgagatgggtggatcacctgaggtcaggagttcaagaacagcctgcccaacatggtgaaaccctgcctctactaaaaatacaaaaattagctgggcatggtggcaggcacctgtaatcccagctactcaggaggctgaggcaggagagtcgcttgaacccaggaggtggtggttgcagtgagcggagatcgtgccactgcaccccagcctccatctcaaaaaaaaaaaaaaagatgcttaaaggcataaataaggggtaccactcgctaaaataacaagaaactaagaaacagagatggatgaaatgtaactaggtctgaaaacaaagatatctttgccaaaaaaactagtcattgaagttactaaactcaatatacaggataaattctagactttgtcctgtcagagaaggcaagggaattagaagatgatgctgagaatgttactgtgtacaacactcacagaaaaagataagaaatataaatgagcaattaggagaaatggagaattgaccacaggctctacaatataccttactagaatttagaggtttgtttaggagtgtatttgagaggtttcagaagaaaatggaggaaatggtagagaagtaatatttgaagctgtcatagctgagaatcttccagaattgaagaaggatgtgagtcttgaaggaaatgtgctcccaagagaaatttcaaacatctgggaaggaaagaaaggcctgcattgagcaattgatattctttacagctcagctttggctgattaaaatgagccttttctgttttcactggaaaccaccaaaacagaaatgtaatgtgttgtatataccaaaccatgcctcttgaacaagggtccttataaataaatcataaaagaagagccctgtggacaactaaacccacaggatcaagataccaaggaagatctctctagaaaaggcagtctcctgtcagcacctttgtgaaaaataggtgggaagacagtaatggcttgttgtaccatcttgaggtccatgtctaaaaactgttttcaaaaggaacaccatggctgccccaatctggtagaaagaaaaatttgaataggattctacataaaaagtgttgccagttagaacattttgttgaagttttcttttaatgaagagggaaaaatagaaagtaattcctatggaatgagaccttgtgaacattggatactgcttcaagttcacagaaacattgaactgattgccagttaagttctcagaaattagatttaattaatgtggacagttacatacatcggtgcacacccagaagacccgtgtgcagaatctgactgaaggtgtacttacttcgatgaatctcttctcatcactgctttgtcaaagcagattgctatgaaataaactatacaaacaactacccttgaaggctgatagcaataggatttcaatcagtacagataggagattctatttctgtagatgaaaaagatcatacattgattttctgtgtgactttaaataaattcctggaaaccttgtaatgttaggtactaggtagaatgaaaaaaatgaagcaaaacaaaacaaagaaaaaaaccagagtagattgggttttctttctgcttccatgtggagatctagccttttgaaactgagcattttggaagacatgccgtcccctgtggaatgttcattccgagtatgggacaacagaaaatatttagcagacctggtgatgagatgatcttgctttctcaaactggacaatgggaaaactcttcttggctactcactacttacatttcatctcttttctcattgatatagatctcccacatttgtggataggaatttctctcacctgatgaaatatcatctgtgaacaacagaaatctgtcatcttattttggtatttatcacaagtagaagaaagatgtcaagagttctaatcagtcactggatatcaaatatcagaaatgtcctcaattggaattgtattctcagtaaatcctaaagcatttgggaccttcacatgtgctaatactgtttatatttatttggaaattaaccaaatataaccaaaagacagtggaataaccatagaaacctttaaatggaataaaatttatggcaatcaacattattaggaagaaaaagtatactacctagaaacagtgcaagaacaacgaggatcttctgtgcatctaactatataggtctagaaatatataaagtgaattatgatagaattaaaaggagaaactaacaaatccataattatatctcaacactcatctaacaaaaattgatagctacaaataatcaaaaattaataaagatatggacaattttaacaacaaaatcagcacactatgtatttagagactccatctttccaatggaaaaatacacattatttcaagtactcaatgaacatttttagaaagtgactgtgaactaggtcacaaaaagaagtattgctaaatttcaaaggatcagtatcatacaggggttctctgattgaaacgcaattaaattagaaatgcactaagaagtgaaaatggaaatataaccactgtgctcctaaatgactatgggttaagttaaaagaaatcacagtaagaattacaaaacataaggcactgaattgaatcaggtgatgtatataaaaacttttggtatataattaaagtggtaccaaggaggaaatgtataaccctaaatgtgttcattaaaaataaaaaatcaatgacttattcaacctgtaaagcaagaggaaaaaaaagagtaacaagtaaaacattattaatggacataaaatgagaccatagtaagtaaggagcttcactgcattcttggatgtgaagactcaattattatgaacttagttcttcccagtttaacctatgaattcaatgtaattcaaactcaaaatttcaacaagcattttcataaaatcagaaaaccaaacactaaaatcatggagaagatcaaaggggtcagaatagtcaagacaattttgaggaaaaacaaagtgggctgagaaggcctatcagacatcaattgatttaaagctggagtgtgggatctaccagggatatgcagatagaaccacagactagaatacagagctcagaagcacacctgtatatttatggacacttgatgttttgcggaagcatcgttagagatcagtgggaaatagatggaccatacaatgaatgaggctggcttcatagtttatccatgggggaaaagtaaaattagatcgcatgttcacggcaagcacaaaaatagattctgggtaaattcaagtcctaaatgtgaaaaaccaaattttaaactttaaaatgtaggtgtaagaaaagattttcgtgaacaaaacataaaaagcagagaacatacagggatatgttaaaatttacatcttttataccataggatgccataagcaaagttaaagataagctacactaagataagggtagaagatcatatttgccatgcacataactaacaatggattagcatctagaacatatccaaaggtttaaaaagaaaaagacaatccagcaggaaaatgggtaaaggaagcatgaaaagccagttaacatggaagaagtctaaccttgccagtaatccgggatgtatgtgcaaattaaaatgcacccatcaggttaactaaaacttgaatgtctgataacaccaagtatttggtgaggaggtgggccaaatggaaaacctcattcactactgaagcgagagtaaattggtaaaagcaccgatttgtcacccagagcgattcggtgacatgtagcaatgttgaagatgttgctaagatccaacaattccacatcaaactatattctgtaaagaatctcttcaacaggtatccaaggagataggtataaaaaagaatttcattgtatcattgtttataatagtgaaaagttggaaacaacctaaatgtccatggacaggaaaatgttggcatattcaagcaacagaataataataccttatggcagttaaaatagcaaactattatgtatcgacctggagaaatctccaaaatggtgttgaaggcaaaaagcaactcttagaatggtatgtatattcttaaatgtgaagttcttaaatttaaagtttaaaaacatgcaaaataatgttattagattgaatcacataaaatgggtgtttttgtaggtgaaagaaaaatacaggcaaacatcagcatcttttttaagctcaacctagtatttgttgatacattcatggtaacactgggcatgaaattcagtgtggcattatctccttgagggcagcggggaggagagaatggtatggtgttgaggcgggcatgtgagggagcttctgctttggctgttaacttttctttcttcaaaaaacttttgaagaaaatatggcaaatgataaacttatcaaggggaggtgataggaacatgggtatacttactccattcttatacatttctgttgaaaatatttgctaatgtttagagcaaaccaaagtgttgatagaggtataaaatttttaatctcatgacattataaagaaatatttacaaagtgattaaatcctttgctgcttacttatctgaacataccagtcgcgaggcttttagtgtaacataaaaaattgaaaagcatggctcccttcacacaccaggcaaaagcttcaaattttgttttgttcttttagcactggtaagattgtcatcattaaaaccattcattagtgcctcttttgcttgctgttcttcggtggcagtcagatgcatctatctaccatggtatataaaatttggtgatgatattcaaattactttttttcttctttttctttttctttctttttttttcttttttacttttttgatgccaataggaatctgcaagcagaatatgaccgtctaaagcagcagcacgaacataaaggcctgtccccactgccgtcccctcctgaaatgatgcccacctctccccagagtccccgggatgctgagctcattgctgaggccaagctactgcgtcaacacaaaggccgcctggaagccaggatgcaaatcctggaagaccacaataaacagctggagtcacagttacacaggctaaggcagctgctggagcaagtgaggagagagatgggatttttacaaacattcatttttccctcttaaacaaaactaaacctcagagagcactttttataggtgcaacaagcatcaattcttaagtgcttggtatgtgcctgcaaagtgatagtatcaaaggatagaagtagaggagatagaaaaactagtgtgtcttttttgtatttgtccaatattgtttcctaccaaaatggttttttcttgaccaatttgaaatacatcttggggaaaaaaacgcctaaaggtttccactagttctctaaaagtgaatatttcacttcttgaaatggaactatttcatttacaattagttatattttctggtatacctttgtgttttttttctcctaatccctaacacatagttctttaagcctccatcgaaaacctagcaagatactgcattgtaagaggacctacctggacatagttctggctttctgggaattttaaatttttcaattatgttctctctatcttgttacttaatacttcacaaagatatgaatcttccattacagttttgagatctcacatagtctcatcattcacacatgaccttctaaatcttccagttatttaatgtaatgatgtatagtctcattccagtgtagctctgatttttttctcaaatttataagggagcacaattcagatacaaagacagtttctatggattatatcaacagtgaaatatcccaaattaaacaatctttgggagggcttctaaagtaggaagggtcaaaatttatgagtcctgagtgtgtatcatattttgaaatttatacatttgtatgtttattatgaaaagtaattctgttttcttttggatgacttagccccaggcagaggccaaagtgaatggcacaacggtgtcctctccttctacctctctacagaggtccgacagcagtcagcctatgctgctccgagtggttggcagtcaaacttcggactccatgggtaagtgtcctagctactctcagattttgttgtctgaagaaaggtagagtcgtattacagggacatgaatatttggccgtaagtgtttgactcatcttggtatcagggagccactgaaaatcatataccaggcgaaaaaagtctaaaaagaaaattctaaaaaggtgtattctggcagctctatctggcccacagaaaacttgtataggtgagaagaccagttaggaggcaattgccaaggccaagattggtgagttctgagggcctgcacttgagagatgtgggaggagaggactgtgagactattctataaaaatagacttgccagggggctgggcgtggaggctcacgcctgtaatcccagcactttgggagggtgaggtgggcggatcacaaggttaggagttgaagaccagcccggccaatatggtgaaaccctgtctctactaaaaatagaaaaattagccaggcatggtggtgggcgcctatagtcccagctactcgggaggatgaggcaggagaatcgcttgagcccaggaggcggaggttgcagtgagccaagatggcaccattgcactccagcctgggcgacagagcaagactgtgtctcaaaaaaaaaaaaaaaaaatagagttcccagggtctggggactgagtgcaaattgtaagaagaggaatgaagggagaggatttggttggaagaagatagtgaaacttctgattgtggacataatgtgtttgagaaattgacaggtcttctaagtcatgtcccaaaagaaattaagatacagatctatacttgaagtaagtgggcaaactggagagatttgagaatgagtttcatagaattgattgctgaagggtgtgagatgagaaatctataaaatctataacacaggtgcttcgatccagtgccttggaaaagacctccatttgggtaatgggatagtaaaggatggataagtagggaggttcaaggaagatgtgacaaaaaggtgaaatgctaaagagagctcaatggaaattaaaataaatcacagtccattgggtcactataaatgcattgggtaattttgagaaaccattttaggccaagagaagggaaggtggaaaacttctgtttcaatgaaatgaaagactaggtaatcttaaaatgaatgaggattaaggaaagtgaagacaattttgaaacattaccaagtaagaaggaagccttaggcaaaagttggatgaatttgttgaggaaatggtccacatgttctgttctcattcttagcaatgttctctgcctaggactaggttctaagaaaggtggagctgatgaggcataaatgatcaaaggtcaaaacaagagtagggcattttacagtggtaatgaatggctaggacaggggttcctagccagctgctcattggtttttcctgctgtgtctggctagacaatagagggttttatgaaggccacaaatacttggtcccccttcctcatttctctttctctgtaaaggcccagtaggagtcagctccatcctctctccttacttttccctgggacctaaactggttatatacttggtcctctcaaatcttacctcacagaatagaaaagacctgtgactccttgattccatacacttacagctctattgcctgatatgatgatgtgttcaggaattcatttcatacttgagctcttccatgagggtagaataaagggaggcaaagtgccttaaccaaaatggataggacagaaaggaaaagtcaggggtgtgggtgagttttatggcgaaaaatttggagatcacagtcgggaaaattcaaaagttggatatcatggaagtaaaatactttcaagcaatttctacatctaacatggtgcctcccagcgagctgctgaagattttacttggagatcactgaggggtagggagtacagttcatggagttgatgagaccaacgttgctgagcttatcagcagaggggtgaggtccagatcctgacgacagtggtagatcaggatggaaaagatgttgaagaagatggacgagggctctgaggagatgaacatttctgaggaaagagacagggtagttgaaataaatgtgatgaagttcaagaacctggagcagtgggaagaggcacatcctcctctggagaagccaaatcttgtaggaaagccaggttttgatttttttgagaaggaaaaggatatgtttgaggttattttcctgaatttactacacctccatgatttaaggcaatctctgtgtcagattatctccctccacctgagatctgaatatagctaataaactgttgggattgtaaatgacaacacactacatgaaaaacaactgtatgcatttgcaaagtctgtaaattctgaaaacaactgagctttagtacctcttatttttttctacttcaggattttcccccttttttaagtaagtaaagcatatgaaactaagttacatattttagtggtcagattcagagccctgggtgcttagaagcattaataattatttaggtcgttgacaatggcgaataggcagcatactcgttaaagcactcaaattaaagtgcacattaggatgtggtcctgatgatctgtggagctaaaaagatcatggtagaactgaataccaggacaaaagtgctatattccaatggctaagctaagagataacttgctggcataaaatggataagctgtgttaaatttgtcctctgaaagaaaagactgaattcaagggtactttttcttgaactgtgtattaatctgttttcacactgctataaagaactacctgagactgggtaatttatgaagaaagaggtttattgactcagttccacaaggctggggaggcctcaggaaacttacaatcatgggggaaggtgaaggggaagcaaggcatgtgctacatagcggcaggagagagaaagcgaggggagaactgccacacttttaaaccatcagatcttatgcgaactcactatcatgagaacagcatgggggaaaccgccgccatgatccagtcacctcccaccggacccctcccgcagcacatggggattacaattcaacatgagatttggatggggacacagaaccaaaccatatcgaactgcataagctaacttcatttaaaaaggaaaaaagccttaccgtcttcttgaaggatgcacacaggtgtttaaataaatgcagtgtatatacttgggctttgaaggtttgagatacaaggctgggatctgctgaaccacattctggatagagctgcattctttaaatatgcaaccccgatgactgattttcttttaagtgaaacatgagacaagtcatattaggtgatgtgtctaaagagtcaacatatttcctcaagccatgaaatacttatcactgagtctctatgtaccatttgtattctgtacagttcttactgagacaatgtgctaatgaaacgtacattctattggaggaagcaaatacagaacaaaatagcaattaacaatgtttatcccctattggctctcatgggctccatatacaaatctgtgatgtccagacaactccttatctctgatgactcctaactttccaccagattactgttttttgaagcattttatattttattgatttaaaaattaaactgttcctttgctttttaaaaaatttatcatgtacatttgaggtttatgacataatggctccctagctttttatttagaacaatttcaaacttatggcaaaactgcaattaattcaacagtttgccacatttgctttatagctatttatttatgtacttttacattcatgtgttgttaaatggattgcatatatttagattaacatgtatatctgtatgttaacatatttttatatactgtatatgtttatattttatgtgcatatttaatcatattcatgcgtgtatatagtttgtggatttttttttcactgatccactcaatggttaggtttcatacataacacttcacccctaaacacttgaacacgtgccttctaaaatgaaagatattcttgcataagcacaattatcatgctcaaaaagaacaatactgttatataatgtagaatttaaattcaaatacctccaattctgccaattaatattcttcatagcgatattttacattcaggatcagtgatgtccctgtagtctcctttaatctgaagcactttcccagcctctttaaatctttcatgacattgatatattagaagaggtcgggctagatgttttgtagaatgtcccccaatttgaatttgtctgcttgtatccaagtgattgggttcgggttaaatgttttatgccagattaccatataggtaaggtatcctcagtacatcacatcaaggttttcctcaagattctccatccccttcaccgttcttcactctccctgggcgctccttccatactttggcttctgctatgctgacaactcttaagtcaagatttccagcccagacctcccacctgagcatcttctggataaaattataaataaaaatatagcctaatctgaaatcatgatcaacctttggagcatctcttccaatttcccaatctatacaaagtcattttctaccccttcttcctttacctgccttccttagctatgttccaccaccatcaatccagtcaccaaggtcagtgtgttttgctacttatgaaaaagagcaaaattcttcaattcagctacttctgcccaaatttagccctcatcatgtgttacctgaacagacaatatgaatactttcctaattggttcctctgcctttggtctctctccctttctaagctatcttccagaaacttcagttcctcttctaccattcaaattatatcatattattcccctctttaagcattttatgccttctgtttgacaacagaataaatgtgctctttggccttgagtacattatgttcttaacctgaaatatagcatcctttcttttcactcagtgagttttcttttggaacttaatcatgcattatatcattctggttttgttgttgttgttgttgttgttgttgttgttgtttcttttgtgtgagacggagtctcgctttattgcccaggctggagtgcagtggtgcgatctcagctcattgcaacctccacctcctgggttcaagcgattctcctgcctcaccctcctgagtagctgggattacaggctcgccaccatgcctggctactttttcttgtatttttagtagagacagggtttcaccatgttggccaggctgttcttgaactcccaacctcaagcaatccacccgcctcagcctcccaaagtgctgggattaaaggcatgagccaccacacccagccatgttttcagccagttactagtacttctttcttctgcctacaactccctagaacttaagctccttaaggacaggatgtaagtcttgctcattgtcgttactgtatgaggatactctgtgcaacaaacaatcagtaaagtgcttgttgagttaatattttagaaatcaagcataatacattcttgtgtacacatggaacagcccacacgtttaggaaatttagctactagtttcagtatctttcaccaccattcacaactgatcagctaataatcagcaacaacattgtacaccataatatgttaaaggtgttacacacagaatttatgtgtgaaattgaaagcatcggtcctatatcatatggaaaaaaattaattgtagccaaatgttgggtattggatacatcagtgtgctttttcttctaaaaaatactggagaaaggcaggaaatacacaagtactaagataataacacatcaagtcggaaactggttaaaatccaaagaaaaatgttggtgggcgtatttgttcatacacagccccctttatgagaaaaaataatttcttgtacacagctcctttttaaaaaaaagagaaaataatttgtttagattcagacaaaaacacaggagtaattcttgtgtctattctgcataggctgcgtaggttctggctaaaatcactttttaagcagatagaaccattatcagcgtttgaatcaaagggaagtgagtcagatgggatatcttcccttcaagaaagggatctgaaaccatcgttatatttcagaagactgaagaatatcttgccatggcaaagcattccttttcttttttctcggattaaattgagtcatcccacttcttttttcttcacttcagcagtgattaaaggagactatcatattttgctatatcacggtactatttaactttgactatgtctttccttattttaaaaaatgtttcagtgatttatttggaccacaatcagacaagccaggaagaccaaatagctaataatccaaaaaacattatttttctctttttattatttcagtagttttcagggaacccaggtggtgtttggttacatgaataagttcttcggtggtgatttctgacatttgggtgcatccatcacctgagcagtgtacactgtacccaacgtgtagtcttttatccttcacccccctcccacccttccccccaagtccccagagtccatggtatcattctcatgcctttgcatccgcatagcttagctcccacttataagtgagaaagtacaatgtttggttgtctattcctgagttactttacttagagtaatggtctccaactccatccaggttgctgtgaatgccattatttcattcctttcatgactaatattccatggcgtgtgtgtgtgtgtgtgtgtgtgtgtgtgtgtgtatataaacaccacgtacatactgcattttctttatccactcgttggttgatgggcatttaagctagttccgtatttctgcaattatgaattgcgctgctataatcttggtatgcaagtatatttttcacataatgacttcctttcctttgggtagatatccagtagtgggactgctggatcaaatggtagttctacattttagttctttaaggagcctccatagtgttttccatagtggttgtcctagtttacattcccaccagcagtgtaaaagtgttctgttttcaccacatccacactgacatctattatttatgcatgtttgtggaaatcaccttggagtagagtcaagtttaagtgttaaagcattgccatcaactaagtttaaaatcccccaaagactagcaatatgctatttgagcaggcaatgaatctgtgaagtagggataagggctgtgcaggtctctagtgtgcaactggaactcagtattttcttgttgaataagtgaaaaaagtgaaaaggtgtttttgtttttggtgatgaggggcttgtgatgacaggtattattgttagagtcagaaatattttgaggttgcctattaatatggtttggctctgtgttcccacctaaatctcatctcaaattgtaatccccacgtgtcaggggagggacctgatgggaggtgactggatcatgaagaagttttcccccatgctgttctcgtgatagtgagtgagttctcaggagagctgatggtttttaaagtgtgtggcacttcccccttctctctctctctctctctctctctctctctctctctctctctctctctctctctctctctctcctgctgccatgtaagaggtgccttgcttcccctttgccttccaccatgattctaaacttataatcatgaggcctcctgaggcctcctcacgcatctggaactgtgagtcaattaaacctctttcctttataaattacccagtctcaggtagtatctctatagcagtgtgaaaatggattaatacacctattatgttgtagctacatagtgtatgattagacaagccataaatattatatctggcttgtttcatgcccataatagtgtatcagtcagctgttgctgcataacaaataaccacaaaattctcaagttgcatatttctcattcacgcatctgttgtttggctgaacttttgctggcaatcagctggacttgacaccaagttgtggtttgggttcaggtctgttcaacatgtctctcatccttcttgggctagcaagctacctgggccatatgcttcttgtgcacataaacacaagcgggcaaccccaaccagtcaaagacattctaagcctctacttttgtcatgcccgcttacattccattttccaaagcaggttatgtggccaaatccgaatccccaggccagggaagtactgttttcccagctcttgttcactctgctttatctacattagacttcttgctgtgcttgaggaagccagtcacactctcctctcagagtctttgcatttgccaatccttctgtctggagcacttttccctcaaatacttgtgcaactcataccctccagttcttaaagcttttgctcaactgcatctcatcaatgaggacttccaagactccactttctgatgactctcattgtcccttgctagccctctcctcagagtgttcatcaccactcaagatacctatatagtttacttatttacttgttaagcctgtgtgcctccttatgaatgcgagtttcacagagagagtgtgtgggtggggtttgtttgcttattgctatatcttcagtgaacaatatgccaggcactgttcaaccatttgaacagtgcctggcatatatagttggattttaataaatatttgaataaataaatgaatcttactgtttttaaacttttgtggtttttaaaaggcattttaaaaatctgggttagtatcaaatattacaatggtattactttaacttcaggtttcatttagctgttttaacttttacaatatattctgacacagaaaatattaggcattaagcatttttcaatgagttgattcacttctactcatgcacatatgtgatgtctgatttcgattcttaaaaagagatgagcctgggcgtggtggctcacgcctgtaatcccagcactttgggaggccgaggcaggtggatcacgaggtcaggagattgagactattctggctaacacggtgaaaccctgtctctactaaaaaatataaaaaattagccaggcgtggtggcacgcgcctgtagtcccagctactcaggaggctgaggcaggagaatcacttgaacccggaaggcagaggttgcagctagccgagattccaccactgcactccagcctgggtgacagagcaagactccatctcaaaaaaaaagaaaaagagaaaaaaagcaatgcattaaaaccatcttgagaaatcatgaaaatatggagaaaagaagaaaacaagattatactctacttgtttttatactacctagaatgtaataggcactcaaaaaaatgtctgaatggatacaattatcactgccttaaaagttttccattaaagcaaagaagccaattttacatttgtattatacttggacactcatattaaagactcacagagagtttatctggaaaaataaacttggctgacatcattaggtttatactttataatttgatctttgaaataattcaggaacaggaatgccagtcacttcattgaactgtacctgaattttaacacagtacaattgagttcctagagctccaatatgatgtaattaaactgtcagaaatattaacatcgatgttcatgagcgtcgttcatgatgttctcttggttctgatttattcagtgaggcatactgtcactgaagtggacttactgccattaaaaatgcctcatgtttcccagttccgcaaaaatttgcatcagtaatgaaacagagagatgtaatcagccctgcagttgtcaggatcttgatcctcttggtagtatttcattcatttcatcttcaccagataatggtagtttaaaaccgcaagaaaaatgaaactaaaaatagtgaatttcacttctttttctaaaggcataaacttaagcaaatagtgcatgtgtgtgaggggggaggaagagagagagaaagaggagagagagagtttgtaactattccttttctgctttgtgaccttaattcttcagcacccatttcctgtacttaatattgcaaagaggtttcctgtggtatgttaccaggagactcatgtagtctgaggctttttatctaccttacgttcttatccctccattctaataaaaatatgaagcctcacatccacctagaatatgattttgtcttaatggttagcattggcaatgattcttttagcttctgctgttaaaaaaaaaaaaaggaataaatgcaggattctaatcaaacatgaaaatccaagtggcatagaccaaagggaatgagaagcatatttaagtcatttagtcactggcttccgaagcagttccaagtcagatgtaaacctgaggttgtccctaattaagttcattatggttgacttgctaaagcaaggtcttgttttagatggaagtgacaatgtgcaaaacaaacagagcttgaatagaagttattttcactattggaagattgtatattatgaaaagttagtttcaaaggacctttaaagtttaattttgtttgcacctaagaaatttccctttaacttgcaaatgctgtttgaagtgtatttctttaacacatgaacaaacaatacagacacagattcacaaaatctacaaggagatttccattcccagtgaatatcatccatccataggtttctttgcttccagatcatcattctctcctcacataaacagtcaaaatgtttgtaatgtcttctttataaaacccaaaacataattatgataaagtagtcccaagtaacagaggaaaggaccataactctccaatatatgccatatctacagtttttagaatattcatatttcattacctatataggatatatactatttttatttctattacattggagtttaaaggtacttgagtttcgtttgtatttttggttaaatgtcaaaacaaagagtgaaaaaaagacctcagtgtctcaactcccttcttaccttcatgaagtgactgcaaagtgttcaattcttactcttttgtgttgaggagacagcactgcaagtgtgcagtaatacttattttattacatagaacaaagtttcacatttgtgaatggggcacaaaagagagcttgtcagttttacctttttcaattgactttttcttttattctttttaacttttaaatttattttttgtttttttgtttttttgtttttaaatagagacagggtctcactatgttgcccaagctgctctcaaattcctggcagcaaacaatcctcccacctcggcttcccaaagggctgggattacaggcatgagcgaccgcacccagcctgttttttactgtagtataatatttgtacatatttatggagtgcatttgatattttgttgcatacacagaatgtgttaatgatcaagtcagggtatttagagtattcattatctcatgtatttatcatttctatgtgcggggcacatttcaagtaactagtcaacttttaaaaagatacgcagtaggctgggcgtgttggctcacgcctgtaatcccagcactttgggaggctgaggtgggcagatcatgaggtcaggagttcgagaccagcctggccaatatggtgaaaccctgtctctactaaaaatacaaaaattagctggacgtgttggcgcatgcctgtagtcccagctactcgggaggctgaggcagaagaatcgtttgaacctgggaggcggaggttgcagtgagccaagatcgtgccactgcactccagcctgggtgacagagcaagactccatctcaaaaaaaaaaaaaaaaaaagatatacagtttttttttctccaagggtaatgatatagataaactactgtatggatttcttcttccctttaaagaattacttcctcattattaagcttgagggttttctttgttatttatgagcaagtgaaatgaatttataatggtgttaaaaatgtaatcatggccctttaatatctgttttctataaatgtaattttccattatttgtttttgcttttattaaggtgaggaagatcttctcagtcctccccaggacacaagcacagggttagaggaggtgatggagcaactcaacaactccttccctagttcaagaggtaagctccaatacctagaagggactcagatttgctgggatcaggccactcgcttccctacccaactggtgtgtgtattttccatatggaagccaacacgcagtatcagaatggcaatttgggtccatggtgaaaagatttgatttttaagtgtgaatttgtggtttagagtactctgaattcaaatacccgtgagggcaacatgtttccaaaaataagaataccaccctctatttgtcaagtattttacttgcttcacacattagtctgaagagttaattatgaggtgccctttactgaagagcaattattatgtgacttttacagatgaggaaattaatgccctgatagtgcctttgccagggacatatggctactacgtgctacagcaaggcctagaacaatgcctactgattggtagtggtagagattctgacttgccatctgatgccctttatatttaaaaattgtatcttactccatcatttaaatatagggacaattaaatcttcatagagtagttggttattttttacttcgatagaggaaatacaggcttagcaaagaaagacattaatatttttctttttcttcatcactttggccttgcgtattttacccccatacaaaaacagcattttaccctgcagaattttcccactggcttgcatgagcttcagatgtcttgcttcatccaagatgatgttttgctgctactgttcgtttctgggggcatttatttggtttattgccctcacataaaacaaagtcactctctcgccttccttcaacgaataaaaaggatggtggcagtcacctgtgatcaaatagaagaaaagcctagagaaacaaaagggagaaaacacaaggctttgtggccagtgattggcacctctaatgggtagcctgggagggacgggcagcaggaaatctgggctgtttgttcctctccataagggcaatgaggagggtgtattgagtagtgtgtttttcctatctttttgttcagtgtcagttaacaatggccatttcctagctatttgatgtgcaagtaaacgttgtgcagtgcacattaaaagcaataatgttctggtagagcgttgctaaggaaccgtcaggggaagctaattttaaatgtctgcaccagccatcttttcactgctgagcgccactgaagtgatgattttaacagataaaaatcttatctgtcttccacccacctccacatcccccaccgccacccgcatccccattctgactatcttaggtatctccttcttctagatgtcataattcataatgagaagatcatacacaggcttgacagaatcaggtgctttcacgtgtctcctcattactttgtcctgcttgcttttactagcacctactacgtaccagtggaggtagtagggatggaaagaagaaatgacaaattccttgccttcaaggtacttatggtcaattgcagatacagaactccaaagaaattcaaatcacagtacaatcattgattactgtatgatcctggccccttgaactggcagcttgcttacctgctctggaaagttgctggctgccctgttggcaccctgggcatttcttccacatctaaacaagaggttagtagagaagaagctacagcaaggctcatgactctgcttcttcataggcagccttgacttcctagactcctttttgtacctgagtttctggtccaccctaattagctgtaaggtgaaatcctttgcaccatctccctgtgtcccgcttttagagtccttaaagctagataccacatgggtgtagaagcttcctggaagacaagaaatatacctcctctgatatggtatttagcagtcagtatctctgatgttgatttacttacttgtatggaaacttgggaaactcaattcaggccacctggatagtgtttactaaattagtgcttacggaagaatttcaggccttaagggctgatttaagttctcaaatgtgggagaaggaagccttgtccgataccaattccattaacttaagttccggcttactcagtggtacccttgtggcctgagaaaataaattcacattcttaaaaaacaaaacaattaaatacacaaaaaacacaagagagtagctaaggtattggaaaatctggcctatcattctgtaataccatgatcttggcatttcctcacgttttgctactttcagctaactcaggctttcttacaggcctttttctccccaaattcaagtggataaaaagtttcattattgtaaaaattaggctaattattgatgcactcaaaaaagtggtttttggatgctttctttccaactaaaagcacttttgttttttaattttgaaaaatggcatatgtgtgtgtacacacacatataccgtcaagtttggcgggaacatcttaccagttggtagatgtgttcagctgatattaagcagaaattcttgagaatcttaacatcttgggattacaaagtctttcaaatggaagagccttgaaaggtcattttaacacttttgacatccaggacagtgatttctgactctgttttgatggttatccatatcagaggaacattttacatcacaaactggggtaaagatataaaataaattgtacatgtgtttatgtacacacatgtatatatacacccaccatatgtacacacacacatttacagtgtcatatgcatacaaagatcagaaacaaaagtttcatcaagtgatgccttccatactacatacagtgcatgctgtttttctattttatttatttaaaaacaaaatgctggttgcaacccactaaatggattttctgaaccagtggtttaaaaatactaatctatgtgatctcagtttttcttgcctggttgaattatctttcaaaaaaatttaaattttgagatttttgccgtggaagtttctgccaagacgttgctaatgtctcagagacctttatagttttattctaacactaccatccatgttctcattgttgtgttacaaaaaacaaagttcatgattgctacagctgttttggacagctgtttgagtaactcaaaacagatgtgagagccagaggtctgacatttagtggaaatgtgctattaaataccaccgcgtggtttacttaaccctgctagataattgcccacagaggaaaagccgtttttaaaaaacttatgctcttcataaacataaagtatatagataggtaagctattatgtacctcaaatttacaacttttctgttgccccttgccacagagttggtcctgaaggtgtcagctaacctttctttatcttttattttcacaaagagtacctggaagccaagaaaagtcaagtgccttatttatggccattcagcaggttaagttaggcttctaatcttatcttaatggctttgctaaactgttatcaaaattaataaatgagtggcatgcttctccatttagtgataaaccgatggccaacactatcctgcataataggcaatataagcaggagcatattcaagatatgaatgtgtaaacattcagctttgtgattatatctttctggttggtctctagatatacttagttgttcacaaacacttgggagatttgagtggctcagtgtatatttgaacactgaatattagccaatttctatctaatctgtctatctctaatctcttcctttgtaagtatatgtgtagaaattgaattatagtgtaataagtcattatctactttactataaggtactctctaaagctctgccattctataggaaaactacatgggtacaataaacaaacgtaatttaaaaaataaccccattaagtgatttgtccataagtctctgatcatttagcagactaacaaagatatttttatatgtatgtgcattgatgaaagaaacgctctcctagtcagtagtatggtattaggctctctaaaatgtggtaccactttatatagatgaatgaataataggagccaagataagctcttaatgcagtaaaacaatccagaaagcagttagcagtgctactatttctgctacctgtacaatctcttgcctactgacctgtgccacattatctccaccagcccatgccatcctctttttttcataccatcccctctcaaataagcccgcgtacattctatcaaatacccctaaattaccaacccaacagctttgtaaaacctaccgtcttttaaaattaaaatcttattctgtggttcttttatggaagagcaacataaagaacaaaggcagatagaaatatggtgtgccctttttcaggcaccattctgtttcctgtatgctcccacaaaggatttgagcggttatccctttaatccaggactagcaaactacatacagcccaaatgccaaatctggcccaatacctgtttttataaagctttattggaacacagccatacccattcatttacatgttgcctatagttgctttctcattaccagggcagagtagttgcagcagtgctgaatagctggtccagagaccgtgggcttgcaaagcctgaaatatttactatctggccctttatggggaaaatttgccaatccctgctttacgctattatttcgttgtccattctgactcattacatgtatagagtcacaggcttctgtgctgatcaactttcagctgaacaagattattgagctgaaattgaattgatttatagatttatattcatattcaccaaagagcctgcaagtgtggccatttgaatttttttgacttataaaataacagaaatcctaaaaagggacttattcttccttaagtattttaaatagtcagtgaattaatataaaagaggctaaaagcacccagaaacagtactgtcctgcaattccaactctaaaataatgaattacaatcaataatgtcaattttatagtgcccgaggaaattagacttctcgggacctgaccaagccctttatttagactcaggactgccccagcacacttcccttttgtcttgattcatttcctgacaacacatcacattgccagatggacactgtaactgaaggtctacagaaactcatttccaaaaaaaaataaatgtttagaaaatgaaacatatctgaaactttatttatcggtcaagaacttttaaaaatgttgtaatcaagtagcctctgttttgtcagcgtagaactagtccttttacagtagaaaatatcatttgtttttaactttttctaaagtgaaaaaaaggaccttccttttgtaatgtgttaatgagtacgtggggacccaagtgatgagggaggattttagaagagattagagttagcttggctctgggaggtccattttcataaaatatggtttctgaagaaggatctggaacataacacaagtcatttgctgctacatattaagaaataatcaattgataactgagttctgaatatggcttagtgtagaattactaaagatatgtatcattaagcattcaaagaatcatcgttacattctgaagtacataaccataattacattctaaatcacatggctttctaacaacactgtccttcctaaagatctcaagttttcaaaactagaccaaagttacatgccgaaacaagttacccacctttggcatccaaactaaagtgtgccagtgaagggcaagttacttataacacagaaggactcctcttggtcatgacccaactactactttaccaattcacttcagccagtatttatcaaataccaaaagtgtgtatatacggtacagggcattgggcatagagaggtggatgagcaacatgtggaccccgtcctcaagaggcttatagtcttacaggggaagggaattaattctgccaccagacagtattatgaaacataaagatacttttttaaaaaaaccttgctaaaggaatcaaaaagaaggggtgagtgattcatactgggatttcagccatcaaggaaagaatgatgttctcctccccaaatgatgggaacatcatttggtatggatctcccactagtgacacccacagctgaggagctagtacccatttttctccctcttttccctggcttgaggagcatcttaaatacctggcccttacgtggtcaagctgaaaatctgatactcctaagaaatcgctgagtcatgtaggaaattcagaaggaagagaggaagggagagaaggagaaagggagggaagaaagagaaggagagagggaagaaaaacttagaaactatccttaaatgtatactagaagttttgaaccctaaccttgagtgagttttgaaaggtttctattggtgtcgtagctccatacctcttcattccagactagtagttctcaaattgtttcagggagtttttagtcttcttggagccactgagaatgatgggtggaggggaaagggagatgctgtacaggatctctcacagctctgctttgaactgctcaaaatattggaattccatataagattgttttaggagatgtcccattgctatagttaaaacagtttgaaaaccaagattttaaaggaaattgcatgcccaagacaggctattgacatgtatggacagaagtccctacttttctgtccaattatgacttatcatagaacactttctcatcagagtctacttttgaaatacaaataaatgcatacagatgtaggaatctatgaatcaaggccagtgggtctttagccattgcctcgtaaggctcctgatatttgctgaattggggaggaagtggaaagctcattcctggatctggctctgtggcttgcccattactgggacttacctcttcccctcatctgttctttctgttttctcaaatgcctccaatttcatcatggaaatgctcagcttctatcagatagaacaaattctcccaagaggatggagtccagcctctatgtcgggttctaccttgcatttgatgtgcagactttgggcacacagagtcaactactgtttatgtttcaatgtgctgattgtcaagagtgaagagattctgagactttttttaacattaagtttgagttgtccttgaaaacaatgcccaatttgtcagatttctattctgtgccagttttcatccagtttaatgcgtgaactctatggattttacaaatgacgtcttctggatcatgttatctgtttacactgatcttaagtgtatgtaaaggttatttgactagatgtgtcttttgggttttttgtttctgtttttttttttttttttttttccagcagagaataaatggtcatctcaacatttgtttggtaaaagaagcaaattggtatgaaattgtatatttatgcatgttttttttccctttctgatatctctgcctcttcctctctctattattaaaggaagaaatacccctggaaagccaatgagagaggttagtgagattcaggctcacggccatggcttctgtctgtctcatcctgctttttatgtttggcgtttgtgtaagaattgtgtgtgtgcacgcgcatgtgtgtattacacattgtgtcatcatgtaaggatggtagtcacctctccacttgcagctcatgaggaacattcctcaaatgttcattgccgttgtcatcaccatgacgacaagactggggttgggagcaagaatctctttaaaatggcaatcctttgtagtccctaggttggaatcctgccgttcatcatctgttgccatttgcaacactaacaaaatcttcaaaataaatttagccttgaacataactgatgagtcataaagctttcttccacttccaggaccttagcattttctgccagcgcccttagtttttattcttctgggatgacttcattttgcttttgtttccttttttcttggttcctacgctctttctctcccattttagcgaacattttttgagcacttactgtgtgccaagcattgttctcagcacttgccatctttttcatcatgtcatcttcatgacaaacctgtgaggtaggtactcttattaaccccgttttacagataaggagactgagtcaatgagagagtaagcagtgtgtcccaggtgacagagccaaggatttggatccaggcagtctggctccagacccacactcttaactctcatttgaaaggcttacatcatctcaacgtacccttcagaagatgatcttttttatttggtatttgaagccacacagaacaataaccaattcgattaaaaaattaaatattggagttttgagaggtttttaaaatgcctatttatgggttgaaagggatagggtgcagtcttatcactgaatgtggtttcaggttttacggtgaaagatgcttcttactcctattccaccaggaatattgtctgaatatcgaattacctaattaagtgactgttggatgacaaagtgttaactgacagcccaagtaaaatcaaggttgtctttaccaagaatttaatctgaaggaggagagaaggaaagctctcccatgggatgacagtgttctgggagacaggctggatgggtggagagtccttcttaaatgagaagattctggattccttagcaacaggatggactggagagaccactgattcatttaaacacaggagtcgtaatgaaaactctgccaacatcatgccatacaagtctaatcaatttaatgattcttcagtgtgtctgtgccagtgcctccttccaaggctttgggcagtggggccagggagggaatggtaggctgggaggagaaattgaggaaacctgacttggtgaagcattgaatgcccctgacggtttgcctggttcatgtacttcgtatgtgagacttcttgggttcattcttatggtaagtgccccttaaaatttattcattttaactttttgtagaaaaatgcaccataattttgaccaccttaaacatgtttcactcacaaatgaatttcagaaaaggctagcacatgtaattgaagttatataggcatttgcagacttgactacctgaggtgtatggtgttcagacaagtttccagaagccaaagaatcaaaacaataatgaccttttttaatgctatgaaaatatcccaaatgtacgtaaagcagatttttttcagagattaaattatagagaagaaaagataagcaaatttccctgtagtattccggctttcctttggacaactgaatgctaacaatttatttgggaattgtatttttaaaaaatagagcaccagattgctattgaggtcttggatctttgccagaaagtctcaattccaatcgctgtggaaaacaattccctcaggcagtggtgacgtgtgagactaaatgtgttgcagttagcgccaacttgaaaaacatacaactgccctaatgttcaaggcatagtgcctttgtgttcaataatccttaagaatggattaaatcaatactttctatagacatagttttctgtcaccttgtgcctgaaggtgattgcaaatgcctgaatcctggctgcttttcagtacctctcatacttcatagtatgagattgtaattttgactttagaaaaatctgtcaggtaacattaatgacctcccgaatgctctgccttacacacatggataatagaactaggatacaaatctactttctatagtcatgtcacagtgcagtcttacccctccaacggattaaagtatgattctttagggcagtagtttgtaaaaagagattgacttcttttttctggatctaatgaaaaactccatggaaagaaattagaattatttattctggtaaagcaggtatttagtgaagtaaccaaaggcataatatagatgatgaggtgactctaaaagttctttatttttatagcacaaagatggccacaaggtcatttgtgaaaatgcagcagtgtaaaccggttaaaggccacccaactttttgtcggagtgtgcatggcacattaagaataatgaacctgttttccctggcaaatctttaaatagcagatacccctagaacttatgcttcttgagagactcaagaattttccttccagttagtaactgaacaccatttcaaggaagagaagcaccacttggctatataatccataaatgcatttatttgttttattatattttgaactgccatctacatcccctagcacacagcctaaaaagaaagacactttgtgattatcgataagctgacaggaaaaaaaatgagttttctccccttttcgttgatgttttgtaatatgttttctagctactaggtggactacatactatagtcacatgtgggccatgagaaatacttcgaattacattcaggcaccatgttgtaaaggtcctggactttgtttttactgattttgttaaccgtaaagatcgctagtaattaaaaattggcagttagtccatctatcttcaatttatgcatgaataattatgcagatttcccagggttgctggacagccaaaaatagatacaggggaagccctccaacttgatagcagcagttatatatttgtactctgagctctaaggagcagcaaaggccccactgtgtcgtcttcctgtggtttttatggcacagaaagccaaaaatgatttcagttcttcactgagggctgccaaactattggcccactttatgaatagttgcatatgctttgttaaaaaatttttatacttgcagtctcagccaaaatccaaagtgattttctaaaatataattaatactccatgaaattctttgcactaataaagcacaaaaagatagatatacaaacttggtcaccttaatagaaatgcctgaatgacattaaacttttaataagtaagtcttcagttgatctggtgccatcactgtttaagtgcctgcccgtgaatccgcttcattttgtagagaagctatatctcttgaaataaatattaaaacaaaatactctccctagtctatagctttaatttttattgggatatctttaatttttattggtatttttaacaattattatgggaatctgtaaagttgatacatggcaaggtagtaatagcctagtaaagcatttcagttccaaagacaatacttgaatagtggaaggatttaccaatgtgcaataattaaaattagccatgtaaaactatgggacatagacgaaaaggcaagccataaagtaagtctcagattatcttactctaaatctgaattttgctacgaagtacccagggacattgtgctgttctttttctccgtgctgggagattcgtgctaggtcgtgctgcattattagtaaaaggctattgtgatagttaaccctcatttaggaggagctctaagatggattcacaaaatacccaaatgcatacaatacatgtgggtcaccttataattagggtctagagtaatttggaatgtaaagcaatttttattctgaggtttcctaattcaaatgttaatagtgcaccaaaaggtcaattcaagagtttattattattatttttcaacccaagtaaaagcagagagaaaatagccacctccaccatagcctcagaagcaagccaacagcctgaaacagctttgaaatgaaaagttggtgtggcggtgatggtggcagtgataatggtgacgatggttgggtgctggtgatggtagtggtagttgtgaaggtggtgatggtggtttgattgatagtaaaaaaaatgttcgttaatacaagtagagagtaagtaatcaatcaatcactcatagccaaggtggaaaagatgtatcccatcatggaatattcctgttctgatagaaatcttgtgcttatctatggaattcttttgatatatatttacattgggaacctgaatgtagcttgacatttttccatgtaaacaccagtagcctgatccaacattaagctgatactaacaaacaacgtgtaatggcttcattaataaggctttgcttcttcctggaaactggtgaaaaatcaaaccttgttgtgtacaccctcgatgcagcttctgtgttgtcttcacccagaaatggggaatgatttcccaaatggcaaagaaacagagtgatgctatctatctgcaccttttgtaaagtctgtctttctttctctttgttttccaggacacaatgtaggaagtcttttccacatggcagatgatttgggcagagcgatggagtccttagtatcagtcatgacagatgaagaaggagcagaataaatgttttacaactcctgattcccgcatggtttttataatattcatacaacaaagaggattagacagtaagagtttacaagaaataaatctatatttttgtgaagggtagtggtattatactgtagatttcagtagtttctaagtctgttattgttttgttaacaatggcaggttttacacgtctatgcaattgtacaaaaaagttataagaaaactacatgtaaaatcttgatagctaaataacttgccatttctttatatggaacgcattttgggttgtttaaaaatttataacagttataaagaaagattgtaaactaaagtgtgctttataaaaaaaagttgtttataaaaacccctaaaaacaaaacaaacacacacacacacacatacacacacacacacaaaactttgaggcagcgcattgttttgcatccttttggcgtgatatccatatgaaattcatggctttttctttttttgcatattaaagataagacttcctctaccaccacaccaaatgactactacacactgctcatttgagaactgtcagctgagtggggcaggcttgagttttcatttcatatatctatatgtctataagtatataaatactatagttatatagataaagagatacgaatttctatagactgactttttccattttttaaatgttcatgtcacatcctaatagaaagaaattacttctagtcagtcatccaggcttacctgcttggtctagaatggatttttcccggagccggaagccaggaggaaactacaccacactaaaacattgtctacagctccagatgtttctcattttaaacaactttccactgacaacgaaagtaaagtaaagtattggatttttttaaagggaacatgtgaatgaatacacaggacttattatatcagagtgagtaatcggttggttggttgattgattgattgattgatacattcagcttcctgctgctagcaatgccacgatttagatttaatgatgcttcagtggaaatcaatcagaaggtattctgaccttgtgaacatcagaaggtattttttaactcccaagcagtagcaggacgatgatagggctggagggctatggattcccagcccatccctgtgaaggagtaggccactctttaagtgaaggattggatgattgttcataatacataaagttctctgtaattacaactaaattattatgccctcttctcacagtcaaaaggaactgggtggtttggtttttgttgcttttttagatttattgtcccatgtgggatgagtttttaaatgccacaagacataatttaaaataaataaactttgggaaaaggtgtaaaacagtagccccatcacatttgtgatactgacaggtatcaacccagaagcccatgaactgtgtttccatcctttgcatttctctgcgagtagttccacacaggtttgtaagtaagtaagaaagaaggcaaattgattcaaatgttacaaaaaaacccttcttggtggattagacaggttaaatatataaacaaacaaacaaaaattgctcaaaaaagaggagaaaagctcaagaggaaaagctaaggactggtaggaaaaagctttactctttcatgccattttatttctttttgatttttaaatcattcattcaatagataccaccgtgtgacctataattttgcaaatctgttacctctgacatcaagtgtaattagcttttggagagtgggctgacatcaagtgtaattagcttttggagagtgggttttgtccattattaataattaattaattaacatcaaacacggcttctcatgctatttctacctcactttggttttggggtgttcctgataattgtgcacacctgagttcacagcttcaccacttgtccattgcgttattttctttttcctttataattctttctttttccttcataattttcaaaagaaaacccaaagctctaaggtaacaaattaccaaattacatgaagatttggtttttgtcttgcatttttttcctttatgtgacgctggaccttttctttacccaaggatttttaaaactcagatttaaaacaaggggttactttacatcctactaagaagtttaagtaagtaagtttcattctaaaatcagaggtaaatagagtgcataaataattttgttttaatctttttgtttttcttttagacacattagctctggagtgagtctgtcataatatttgaacaaaaattgagagctttattgctgcattttaagcataattaatttggacattatttcgtgttgtgttctttataaccaccaagtattaaactgtaaatcataatgtaactgaagcataaacatcacatggcatgttttgtcattgttttcaggtactgagttcttacttgagtatcataatatattgtgttttaacaccaacactgtaacatttacgaattatttttttaaacttcagttttactgcattttcacaacatatcagacttcaccaaatatatgccttactattgtattatagtactgctttactgtgtatctcaataaagcacgcagttatgttacaaaaaagtattgactggactgcagtactttgtttttattttaatttagttgttgttacttacttacttactttttaaataggtaatacatgcatatgagtaaaaaactataatccagaaagacagtgaaaacactcctaactaccccttcccccatatcaatcaatcatcctcattgctctatgagtagacattattaatttcttatttagtcttccagagggtctttctttattaattattatataagcagttaaaataatatatatgttcctatttatttttttcctattattatttcataggatatagcattctctgcacccagttatgcaccttacttgtttgtttgtttaaatttaaatatggactcaagaaatcttttcatttaaatatataaaatgctttctcattcttttttatagctgtataatatttcattatatgttcataggatattttatttaagcagttccctttggtgggatatgtagtctgttgtcagtctttcttttgctataacaaacaatattgcacatttctcattacatcatttcatttgtgcataaacaaacaaatctgtgggatacttcctagaagtgagattgctggatcaaagggggtaagcatttgtagactgggagatgatacattttgtgcagtgattgattgattgatagtcatagtgtttgtttgtttgttgtgttttttgttttaataatgacaagtatattaattaagtcagtttgcagttcatactttgcttctcaagagaatttcatatcacttctattcttaatgtcaccatctaagaggatgcatgagtgagtagtaagaaagagacacctaaaatgatgtctcacaactggttctggggaagaagaatcccttaccatagtcaaccaccaccatggggagaacctctcctttgcccctgccctgctctgtttcttgccctagctgcaaaggaagctgagaaagtgggtagcaatgtcagcacttcttagggagaggctatctatctttacctattcccaaggttcatggatggggtgggcggggttccccaacagtgttcagatactggtgagccaaaggaataacataagtccaccaggtgcagcctatcctagtgattttggaaataataggagatgagatgatccatctcattagaaatgatgtttgttagtagatgtggcatctctgctgtgaatcaatcacttgctaattttttgaaagtagggtgatgatgctgacctaagtgactaccacattgaaacacttcccttgacatccacacataccaagaaaaattttcatcctatttaaataaacaaatcatttatccttcccaccattacccgaacctacctttgtttgaaacacccagactggctgttttggtgacacttaaggaggtaactgaggaatcttcaatacttcaccacgtctaagacaactgtgtgtggatgactctgaggagggcatttggttttccattccatacttggcacacactagaagagacagaattaattcagttaaaaattaaaatgaatcgagctggcacagattatgcaccggcaagcaaaatgtgtgtttgtttgggagaaagcaccaagactaatggatgtgttctgtagagctgcgatgggatttccctgaatttgtaatgctctaatggtggaatgaatacaaaggcaggcactggcgcacttgcaaagactttgccttcaaattaagtgtaggaaggacacaaatcaaattctttcccacagtagcaaagccattggagtaggaactataaatatgttcttcaatgccccttgcacgtcagtgtactgtgatctcatggacttagctgacaacacaagagtggcagcatgcccaacattccataataaacaatattgtgtgaatgtgtaaagtttggggatgtttgtttgagagtagcttttgtgtacagaaaaggttacctacagtaacttgaggtttaaatgttatatgtacatatgtgtgtatgtacatgtgtgtattttatatacattcaggattttagctcttccataactttattttgaaataattcaaacaagaaaaactgaaacaaaagaaaaattgcaagaacagtacaaagaaagaacccacatataccctttacccaggttaatgaattgtttacattttgcttcatttactttatcgttctctcaatgaatagatgatagtttttcctgaaccattttaagaataagttgtagacatcatgcctccttacatttaaatacatcatgtacatttcctaatatctaggacagtctcttgtataaccatagtacaattatcaaaataaaaaaattatatatagctatcatctactccacagtccatattcaaccaaatattgtcaattgtgccaatgatgtctttcatcattatatatatttccctagtctggactctaattcatgatttcatgacatttagttgtcatatctctttaatcacctttgatccggaacagtgtctctgcctttctctgtcttcaaagaccttcacatttttaagagtacaagacagttactttgtaggatgtgcatcaatttgggtttgtctgatgtgttctcatggtttagattcagggtatgcatttttgtcaggaatactacacaaacaatgatgtgtcctcagcatgtgataccaggaggcatattcccattcttggtgctgttaacactgatcatttggtaaaggtggtgtctgccaggtttctccacttggtatacattttaaaacctaagttttcataaatctttaggttcaacttagaaatttcatttttagatatataaatgtagacaatttgtatgaagtaagaacagtcacttttagtgagcagacttagccacgttgagtagtctgaattttttcgttctaagctgtatttatacacttaatgtgctttattttcaagcctatctaatatctcacagggaagaccaacgccaaccaacagcacctccac

What is claimed is:

1. An oligomeric compound comprising a modified oligonucleotide consisting of 14-30 linked nucleosides, wherein the modified oligonucleotide is complementary to a dystrophin pre-mRNA; and wherein each of at least 6 of the 14-30 linked nucleosides of the modified oligonucleotide has a structure independently selected from Formula II: [chemical structure]
wherein for each nucleoside of Formula II:
Bx is a nucleobase;
R¹ is independently selected from among: CH₂OCH₃ and C(═O)NR²R³, wherein R² and R³ are each independently selected from among: hydrogen and methyl, or R² is hydrogen and R³ is selected from among: methyl, ethyl, propyl, and isopropyl.

2. The oligomeric compound of claim 1, wherein each Bx is selected from among adenine, guanine, cytosine, thymine, uracil, and 5-methyl cytosine.

3. The oligomeric compound of claim 1 or 2, wherein R¹ is CH₂OCH₃ for each nucleoside of Formula II.

4. The oligomeric compound of claim 1 or 2, wherein R¹ is C(═O)NR²R³ for each nucleoside of Formula II.

5. The oligomeric compound of any of claims 1, 2, or 4, comprising at least one nucleoside of Formula II wherein at least one of R² and R³ is not hydrogen.

6. The oligomeric compound of any of claims 1, 2, 4, or 5, comprising at least one nucleoside of Formula II wherein R² is hydrogen and R³ is selected from among methyl, ethyl, propyl, or isopropyl.

7. The oligomeric compound of any of claims 1, 2, or 4-6, comprising at least one nucleoside of Formula II wherein R² is hydrogen and R³ is selected from among methyl or ethyl.

8. The oligomeric compound of any of claims 1, 2, or 4-7, comprising at least one nucleoside of Formula II wherein at least one of R² and R³ is methyl.

9. The oligomeric compound of any of claims 1, 2, or 4-7, comprising at least one nucleoside of Formula II wherein R² and R³ of at least one nucleoside of Formula II are methyl.

10. The oligomeric compound of any of claims 1, 2, or 4-9, comprising at least one nucleoside of Formula II wherein at least one of R² and R³ is methyl.

11. The oligomeric compound of any of claims 1, 2, 4-7, or 10, comprising at least one nucleoside of Formula II wherein at least one of R² and R³ is hydrogen.

12. The oligomeric compound of any of claims 1-11, wherein 7 nucleosides of the modified oligonucleotide each has a structure independently selected from Formula II.

13. The oligomeric compound of any of claims 1-11, wherein 8 nucleosides of the modified oligonucleotide each has a structure independently selected from Formula II.

14. The oligomeric compound of any of claims 1-11, wherein 9 nucleosides of the modified oligonucleotide each has a structure independently selected from Formula II.

15. The oligomeric compound of any of claims 1-11, wherein 10 nucleosides of the modified oligonucleotide each has a structure independently selected from Formula II.

16. The oligomeric compound of any of claims 1-11, wherein 11 nucleosides of the modified oligonucleotide each has a structure independently selected from Formula II.

17. The oligomeric compound of any of claims 1-11, wherein 12 nucleosides of the modified oligonucleotide each has a structure independently selected from Formula II.

18. The oligomeric compound of any of claims 1-11, wherein 13 nucleosides of the modified oligonucleotide each has a structure independently selected from Formula II.

19. The oligomeric compound of any of claims 1-11, wherein 14 nucleosides of the modified oligonucleotide each has a structure independently selected from Formula II.

20. The oligomeric compound of any of claims 1-11, wherein 15 nucleosides of the modified oligonucleotide each has a structure independently selected from Formula II.

21. The oligomeric compound of any of claims 1-11, wherein 16 nucleosides of the modified oligonucleotide each has a structure independently selected from Formula II.

22. The oligomeric compound of any of claims 1-11, wherein 17 nucleosides of the modified oligonucleotide each has a structure independently selected from Formula II.

23. The oligomeric compound of any of claims 1-11, wherein 18 nucleosides of the modified oligonucleotide each has a structure independently selected from Formula II.

24. The oligomeric compound of any of claims 1-11, wherein 19 nucleosides of the modified oligonucleotide each has a structure independently selected from Formula II.

25. The oligomeric compound of any of claims 1-11, wherein 20 nucleosides of the modified oligonucleotide each has a structure independently selected from Formula II.

26. The oligomeric compound of any of claims 1-25, wherein R¹ is the same for each of the nucleosides of Formula II.

27. An oligomeric compound comprising a modified oligonucleotide consisting of 14-30 linked nucleosides, wherein the modified oligonucleotide is complementary to a dystrophin pre-mRNA; and wherein each of at least 6 of the 14-30 linked nucleosides of the modified oligonucleotide is an independently selected modified nucleoside comprising a 2′-O—(N-alkyl acetamide) modified sugar moiety or a 2′-MOE modified sugar moiety.

28. The oligomeric compound of claim 27, wherein each 2′-O—(N-alkyl acetamide) modified sugar moiety is either a 2′-O—(N-methyl acetamide) modified sugar moiety or a 2′-O—(N-ethyl acetamide) modified sugar moiety.

29. The oligomeric compound of claim 27 or 28, wherein each of 7 nucleosides of the modified oligonucleotide comprises an independently selected 2′-O—(N-alkyl acetamide) modified sugar moiety or a 2′-MOE modified sugar moiety.

30. The oligomeric compound of claim 27 or 28, wherein each of 8 nucleosides of the modified oligonucleotide comprises an independently selected 2′-O—(N-alkyl acetamide) modified sugar moiety or a 2′-MOE modified sugar moiety.

31. The oligomeric compound of claim 27 or 28, wherein each of 9 nucleosides of the modified oligonucleotide comprises an independently selected 2′-O—(N-alkyl acetamide) modified sugar moiety or a 2′-MOE modified sugar moiety.

32. The oligomeric compound of claim 27 or 28, wherein each of 10 nucleosides of the modified oligonucleotide comprises an independently selected 2′-O—(N-alkyl acetamide) modified sugar moiety or a 2′-MOE modified sugar moiety.

33. The oligomeric compound of claim 27 or 28, wherein each of 11 nucleosides of the modified oligonucleotide comprises an independently selected 2′-O—(N-alkyl acetamide) modified sugar moiety or a 2′-MOE modified sugar moiety.

34. The oligomeric compound of claim 27 or 28, wherein each of 12 nucleosides of the modified oligonucleotide comprises an independently selected 2′-O—(N-alkyl acetamide) modified sugar moiety or a 2′-MOE modified sugar moiety.

35. The oligomeric compound of claim 27 or 28, wherein each of 13 nucleosides of the modified oligonucleotide comprises an independently selected 2′-O—(N-alkyl acetamide) modified sugar moiety or a 2′-MOE modified sugar moiety.

36. The oligomeric compound of claim 27 or 28, wherein each of 14 nucleosides of the modified oligonucleotide comprises an independently selected 2′-O—(N-alkyl acetamide) modified sugar moiety or a 2′-MOE modified sugar moiety.

37. The oligomeric compound of claim 27 or 28, wherein each of 15 nucleosides of the modified oligonucleotide comprises an independently selected 2′-O—(N-alkyl acetamide) modified sugar moiety or a 2′-MOE modified sugar moiety.

38. The oligomeric compound of claim 27 or 28, wherein each of 16 nucleosides of the modified oligonucleotide comprises an independently selected 2′-O—(N-alkyl acetamide) modified sugar moiety or a 2′-MOE modified sugar moiety.

39. The oligomeric compound of claim 27 or 28, wherein each of 17 nucleosides of the modified oligonucleotide comprises an independently selected 2′-O—(N-alkyl acetamide) modified sugar moiety or a 2′-MOE modified sugar moiety.

40. The oligomeric compound of claim 27 or 28, wherein each of 18 nucleosides of the modified oligonucleotide comprises an independently selected 2′-O—(N-alkyl acetamide) modified sugar moiety or a 2′-MOE modified sugar moiety.

41. The oligomeric compound of claim 27 or 28, wherein each of 19 nucleosides of the modified oligonucleotide comprises an independently selected 2′-O—(N-alkyl acetamide) modified sugar moiety or a 2′-MOE modified sugar moiety.

42. The oligomeric compound of claim 27 or 28, wherein each of 20 nucleosides of the modified oligonucleotide comprises an independently selected 2′-O—(N-alkyl acetamide) modified sugar moiety or a 2′-MOE modified sugar moiety.

43. The oligomeric compound of any of claims 27-42, wherein at least one of the 2′-O—(N-alkyl acetamide) modified sugar moieties is a 2′-O—(N-methyl acetamide) modified sugar moiety.

44. The oligomeric compound of any of claims 27-43, wherein the N-alkyl group of each of the 2′-O—(N-alkyl acetamide) modified sugar moieties is the same N-alkyl group.

45. The oligomeric compound of any of claims 27-44, wherein each of the 2′-O—(N-alkyl acetamide) modified sugar moieties is a 2′-O—(N-methyl acetamide) modified sugar moiety.

46. The oligomeric compound of any of claims 27-45, wherein each nucleoside of the modified oligonucleotide comprises a 2′-O—(N-methyl acetamide) modified sugar moiety.

47. The oligomeric compound of any of claims 27-46, wherein each modified sugar moiety of the modified oligonucleotide is the same.

48. The oligomeric compound of any of claims 27-46, wherein each nucleoside of the modified oligonucleotide comprises the same modified sugar moiety.

49. The oligomeric compound of any of claims 27-48, wherein each nucleoside of the modified oligonucleotide comprises a modified sugar moiety.

50. The oligomeric compound of any of claims 27-49, wherein the at least 6 independently selected modified nucleosides each comprise an independently selected 2′-O—(N-alkyl acetamide) modified sugar moiety, and wherein the modified oligonucleotide does not comprise any 2′-MOE modified sugar moieties.

51. The oligomeric compound of any claims 27, 29-42, or 47-49, wherein the at least 6 independently selected modified nucleosides each comprise a 2′-MOE modified sugar moiety.

52. The oligomeric compound of any of claims 1-51, wherein the modified oligonucleotide consists of 16-23 linked nucleosides.

53. The oligomeric compound of any of claims 1-51, wherein the modified oligonucleotide consists of 18-20 linked nucleosides.

54. The oligomeric compound of any of claims 1-21, 26-38, or 43-51, wherein the modified oligonucleotide consists of 16 nucleosides.

55. The oligomeric compound of any of claims 1-22, 26-39, or 43-51, wherein the modified oligonucleotide consists of 17 nucleosides.

56. The oligomeric compound of any of claims 1-23, 26-40, or 43-51, wherein the modified oligonucleotide consists of 18 nucleosides.

57. The oligomeric compound of any of claims 1-24, 26-41, or 43-51, wherein the modified oligonucleotide consists of 19 nucleosides.

58. The oligomeric compound of any of claims 1-51, wherein the modified oligonucleotide consists of 20 nucleosides.

59. The oligomeric compound of any of claims 1-58, wherein the modified oligonucleotide comprises at least one modified internucleoside linkage.

60. The oligomeric compound of any of claims 1-59, wherein the modified oligonucleotide comprises at least one phosphorothioate internucleoside linkage.

61. The oligomeric compound of claim 60, wherein each internucleoside linkage of the modified oligonucleotide is selected from among a phosphorothioate internucleoside linkage and a phosphate internucleoside linkage.

62. The oligomeric compound of claim 61, wherein the phosphate internucleoside linkage is a phosphodiester internucleoside linkage.

63. The oligomeric compound of any of claims 1-60, wherein each internucleoside linkage of the modified oligonucleotide is a phosphorothioate internucleoside linkage.

64. The oligomeric compound of any of claims 1-63, wherein the modified oligonucleotide comprises at least one modified nucleobase.

65. The oligomeric compound of any of claims 1-64, wherein the modified oligonucleotide comprises at least one 5-methyl cytosine.

66. The oligomeric compound of any of claims 27-65, wherein each nucleobase of the modified oligonucleotide is selected from among thymine, 5-methyl cytosine, cytosine, adenine, uracil, and guanine.

67. The oligomeric compound of any of claims 1-66, wherein each cytosine of the modified oligonucleotide is a 5-methyl cytosine.

68. The oligomeric compound of any of claims 1-67, wherein each nucleobase of the modified oligonucleotide is selected from among thymine, 5-methyl cytosine, adenine, and guanine.

69. The oligomeric compound of any of claims 1-68, wherein the nucleobase sequence of the modified oligonucleotide is complementary to exon 51 of human dystrophin pre-mRNA.

70. The oligomeric compound of any of claims 1-68, wherein the nucleobase sequence of the modified oligonucleotide is complementary to exon 53 of human dystrophin pre-mRNA.

71. The oligomeric compound of any of claims 1-68, wherein the nucleobase sequence of the modified oligonucleotide is complementary to exon 2, 8, 43, 44, 45, 46, 50, or 52 of human dystrophin pre-mRNA.

72. The oligomeric compound of any of claims 1-71, wherein the nucleobase sequence of the modified oligonucleotide is at least 70% complementary to the dystrophin pre-mRNA.

73. The oligomeric compound of any of claims 1-71, wherein the nucleobase sequence of the modified oligonucleotide is at least 75% complementary to the dystrophin pre-mRNA.

74. The oligomeric compound of any of claims 1-71, wherein the nucleobase sequence of the modified oligonucleotide is at least 80% complementary to the dystrophin pre-mRNA.

75. The oligomeric compound of any of claims 1-71, wherein the nucleobase sequence of the modified oligonucleotide is at least 85% complementary to the dystrophin pre-mRNA.

76. The oligomeric compound of any of claims 1-71, wherein the nucleobase sequence of the modified oligonucleotide is at least 90% complementary to the dystrophin pre-mRNA.

77. The oligomeric compound of any of claims 1-71, wherein the nucleobase sequence of the modified oligonucleotide is at least 95% complementary to the dystrophin pre-mRNA.

78. The oligomeric compound of any of claims 1-71, wherein the nucleobase sequence of the modified oligonucleotide is 100% complementary to the dystrophin pre-mRNA.

79. The oligomeric compound of any of claims 1-78, wherein the nucleobase sequence of the modified oligonucleotide is complementary to a portion of the dystrophin pre-mRNA that contains a processing site.

80. The oligomeric compound of any of claims 1-79, wherein the nucleobase sequence of the modified oligonucleotide is complementary to a portion of the dystrophin pre-mRNA that contains a mutation.

81. The oligomeric compound of any of claims 1-80, wherein the nucleobase sequence of the modified oligonucleotide is complementary to a portion of the dystrophin pre-mRNA that contains a cryptic processing site.

82. The oligomeric compound of any of claims 1-80, wherein the nucleobase sequence of the modified oligonucleotide is complementary to a portion of the dystrophin pre-mRNA that contains an abberant processing site.

83. The oligomeric compound of any of claims 1-82, wherein the nucleobase sequence of the modified oligonucleotide is complementary to a portion of the dystrophin pre-mRNA that contains an intron-exon junction.

84. The oligomeric compound of any of claims 1-78 wherein the nucleobase sequence of the modified oligonucleotide is complementary to an exon of the dystrophin pre-mRNA.

85. The oligomeric compound of any of claims 1-68 or 72-78, wherein the nucleobase sequence of the modified oligonucleotide is complementary to an intron of the pre-mRNA.

86. The oligomeric compound of any of claims 1-78, wherein the nucleobase sequence of the modified oligonucleotide comprises at least 8 contiguous nucleobases of the nucleobase sequence of SEQ ID NO: 3, 4, 5, 6, 7, 8, 9, 10, 11, 12, 13, 14, 15, 16, 17, 18, 19, 20, 21, 22, 23, 24, 25, 26, 27, 28, 29, 30, 31, 32, 33, 34, 35, 36, 37, 38, 39, 40, 41, 42, 43, 44, 45, 46, 47, 48, 49, 50, 51, 52, 53, 54, 55, 56, 57, 58, 59, 60, 61, 62, 63, 64, 65, 66, 67, 68, 69, 70, 71, 72, 73, 74, 75, 76, 77, 78, 79, 80, 81, 82, 83, 84, 85, 86, 87, 88, 89, 90, 91, 92, 93, 94, 95, 96, 97, 98, 99, 100, 101, 102, 103, 104, 105, 106, 107, 108, 109, 110, 111, 112, 113, 114, 115, 116, 117, 118, 119, 120, 121, 122, 123, 124, 125, 126, 127, 128, 129, 130, 131, 132, 133, 134, 135, 136, 137, 138, 139, 140, 141, 142, 143, 144, 145, 146, 147, 148, 149, 150, 151, 152, 153, 154, 155, 156, 157, 158, 159, 160, 161, 162, 163, 164, 165, 166, 167, 168, 169, 170, 171, 172, 173, 174, 175, 176, 177, 178, 179, 180, 181, 182, 183, 184, 185, 186, 187, 188, 189, 190, 191, 192, 193, 194, 195, 196, 197, 198, 199, 200, 201, 202, 203, 204, 205, 206, or 207.

87. The oligomeric compound of any of claims 1-78, wherein the nucleobase sequence of the modified oligonucleotide comprises at least 12 contiguous nucleobases of the nucleobase sequence of SEQ ID NO: 3, 4, 5, 6, 7, 8, 9, 10, 11, 12, 13, 14, 15, 16, 17, 18, 19, 20, 21, 22, 23, 24, 25, 26, 27, 28, 29, 30, 31, 32, 33, 34, 35, 36, 37, 38, 39, 40, 41, 42, 43, 44, 45, 46, 47, 48, 49, 50, 51, 52, 53, 54, 55, 56, 57, 58, 59, 60, 61, 62, 63, 64, 65, 66, 67, 68, 69, 70, 71, 72, 73, 74, 75, 76, 77, 78, 79, 80, 81, 82, 83, 84, 85, 86, 87, 88, 89, 90, 91, 92, 93, 94, 95, 96, 97, 98, 99, 100, 101, 102, 103, 104, 105, 106, 107, 108, 109, 110, 111, 112, 113, 114, 115, 116, 117, 118, 119, 120, 121, 122, 123, 124, 125, 126, 127, 128, 129, 130, 131, 132, 133, 134, 135, 136, 137, 138, 139, 140, 141, 142, 143, 144, 145, 146, 147, 148, 149, 150, 151, 152, 153, 154, 155, 156, 157, 158, 159, 160, 161, 162, 163, 164, 165, 166, 167, 168, 169, 170, 171, 172, 173, 174, 175, 176, 177, 178, 179, 180, 181, 182, 183, 184, 185, 186, 187, 188, 189, 190, 191, 192, 193, 194, 195, 196, 197, 198, 199, 200, 201, 202, 203, 204, 205, 206, or 207.

88. The oligomeric compound of any of claims 1-78, wherein the nucleobase sequence of the modified oligonucleotide comprises at least 14 contiguous nucleobases of the nucleobase sequence of SEQ ID NO: 3, 4, 5, 6, 7, 8, 9, 10, 11, 12, 13, 14, 15, 16, 17, 18, 19, 20, 21, 22, 23, 24, 25, 26, 27, 28, 29, 30, 31, 32, 33, 34, 35, 36, 37, 38, 39, 40, 41, 42, 43, 44, 45, 46, 47, 48, 49, 50, 51, 52, 53, 54, 55, 56, 57, 58, 59, 60, 61, 62, 63, 64, 65, 66, 67, 68, 69, 70, 71, 72, 73, 74, 75, 76, 77, 78, 79, 80, 81, 82, 83, 84, 85, 86, 87, 88, 89, 90, 91, 92, 93, 94, 95, 96, 97, 98, 99, 100, 101, 102, 103, 104, 105, 106, 107, 108, 109, 110, 111, 112, 113, 114, 115, 116, 117, 118, 119, 120, 121, 122, 123, 124, 125, 126, 127, 128, 129, 130, 131, 132, 133, 134, 135, 136, 137, 138, 139, 140, 141, 142, 143, 144, 145, 146, 147, 148, 149, 150, 151, 152, 153, 154, 155, 156, 157, 158, 159, 160, 161, 162, 163, 164, 165, 166, 167, 168, 169, 170, 171, 172, 173, 174, 175, 176, 177, 178, 179, 180, 181, 182, 183, 184, 185, 186, 187, 188, 189, 190, 191, 192, 193, 194, 195, 196, 197, 198, 199, 200, 201, 202, 203, 204, 205, 206, or 207.

89. The oligomeric compound of any of claims 1-78, wherein the nucleobase sequence of the modified oligonucleotide comprises at least 16 contiguous nucleobases of the nucleobase sequence of SEQ ID NO: 3, 4, 5, 6, 7, 8, 9, 10, 11, 12, 13, 14, 15, 16, 17, 18, 19, 20, 21, 22, 23, 24, 25, 26, 27, 28, 29, 30, 31, 32, 33, 34, 35, 36, 37, 38, 39, 40, 41, 42, 43, 44, 45, 46, 47, 48, 49, 50, 51, 52, 53, 54, 55, 56, 57, 58, 59, 60, 61, 62, 63, 64, 65, 66, 67, 68, 69, 70, 71, 72, 73, 74, 75, 76, 77, 78, 79, 80, 81, 82, 83, 84, 85, 86, 87, 88, 89, 90, 91, 92, 93, 94, 95, 96, 97, 98, 99, 100, 101, 102, 103, 104, 105, 106, 107, 108, 109, 110, 111, 112, 113, 114, 115, 116, 117, 118, 119, 120, 121, 122, 123, 124, 125, 126, 127, 128, 129, 130, 131, 132, 133, 134, 135, 136, 137, 138, 139, 140, 141, 142, 143, 144, 145, 146, 147, 148, 149, 150, 151, 152, 153, 154, 155, 156, 157, 158, 159, 160, 161, 162, 163, 164, 165, 166, 167, 168, 169, 170, 171, 172, 173, 174, 175, 176, 177, 178, 179, 180, 181, 182, 183, 184, 185, 186, 187, 188, 189, 190, 191, 192, 193, 194, 195, 196, 197, 198, 199, 200, 201, 202, 203, 204, 205, 206, or 207.

90. The oligomeric compound of any of claims 1-78, wherein the nucleobase sequence of the modified oligonucleotide comprises the nucleobase sequence of SEQ ID NO: 3, 4, 5, 6, 7, 8, 9, 10, 11, 12, 13, 14, 15, 16, 17, 18, 19, 20, 21, 22, 23, 24, 25, 26, 27, 28, 29, 30, 31, 32, 33, 34, 35, 36, 37, 38, 39, 40, 41, 42, 43, 44, 45, 46, 47, 48, 49, 50, 51, 52, 53, 54, 55, 56, 57, 58, 59, 60, 61, 62, 63, 64, 65, 66, 67, 68, 69, 70, 71, 72, 73, 74, 75, 76, 77, 78, 79, 80, 81, 82, 83, 84, 85, 86, 87, 88, 89, 90, 91, 92, 93, 94, 95, 96, 97, 98, 99, 100, 101, 102, 103, 104, 105, 106, 107, 108, 109, 110, 111, 112, 113, 114, 115, 116, 117, 118, 119, 120, 121, 122, 123, 124, 125, 126, 127, 128, 129, 130, 131, 132, 133, 134, 135, 136, 137, 138, 139, 140, 141, 142, 143, 144, 145, 146, 147, 148, 149, 150, 151, 152, 153, 154, 155, 156, 157, 158, 159, 160, 161, 162, 163, 164, 165, 166, 167, 168, 169, 170, 171, 172, 173, 174, 175, 176, 177, 178, 179, 180, 181, 182, 183, 184, 185, 186, 187, 188, 189, 190, 191, 192, 193, 194, 195, 196, 197, 198, 199, 200, 201, 202, 203, 204, 205, 206, or 207.

91. The oligomeric compound of any of claims 1-78, wherein the nucleobase sequence of the modified oligonucleotide consists of the nucleobase sequence of SEQ ID NO: 3, 4, 5, 6, 7, 8, 9, 10, 11, 12, 13, 14, 15, 16, 17, 18, 19, 20, 21, 22, 23, 24, 25, 26, 27, 28, 29, 30, 31, 32, 33, 34, 35, 36, 37, 38, 39, 40, 41, 42, 43, 44, 45, 46, 47, 48, 49, 50, 51, 52, 53, 54, 55, 56, 57, 58, 59, 60, 61, 62, 63, 64, 65, 66, 67, 68, 69, 70, 71, 72, 73, 74, 75, 76, 77, 78, 79, 80, 81, 82, 83, 84, 85, 86, 87, 88, 89, 90, 91, 92, 93, 94, 95, 96, 97, 98, 99, 100, 101, 102, 103, 104, 105, 106, 107, 108, 109, 110, 111, 112, 113, 114, 115, 116, 117, 118, 119, 120, 121, 122, 123, 124, 125, 126, 127, 128, 129, 130, 131, 132, 133, 134, 135, 136, 137, 138, 139, 140, 141, 142, 143, 144, 145, 146, 147, 148, 149, 150, 151, 152, 153, 154, 155, 156, 157, 158, 159, 160, 161, 162, 163, 164, 165, 166, 167, 168, 169, 170, 171, 172, 173, 174, 175, 176, 177, 178, 179, 180, 181, 182, 183, 184, 185, 186, 187, 188, 189, 190, 191, 192, 193, 194, 195, 196, 197, 198, 199, 200, 201, 202, 203, 204, 205, 206, or 207.

92. The oligomeric compound of any of claims 1-78, wherein the nucleobase sequence of the modified oligonucleotide comprises at least 8 contiguous nucleobases of SEQ ID NO: 175 or 188.

93. The oligomeric compound of any of claims 1-78, wherein the nucleobase sequence of the modified oligonucleotide comprises at least 12 contiguous nucleobases of SEQ ID NO: 175 or 188.

94. The oligomeric compound of any of claims 1-78, wherein the nucleobase sequence of the modified oligonucleotide comprises at least 14 contiguous nucleobases of SEQ ID NO: 175 or 188.

95. The oligomeric compound of any of claims 1-78, wherein the nucleobase sequence of the modified oligonucleotide comprises at least 16 contiguous nucleobases of SEQ ID NO: 175 or 188.

96. The oligomeric compound of any of claims 1-78, wherein the nucleobase sequence of the modified oligonucleotide comprises the nucleobase sequence of SEQ ID NO: 175 or 188.

97. The oligomeric compound of any of claims 1-78, wherein the nucleobase sequence of the modified oligonucleotide consists of the nucleobase sequence of SEQ ID NO: 175 or 188.

98. The oligomeric compound of any of claims 1-97, wherein the nucleobase sequence of the dystrophin pre-mRNA comprises the nucleobase sequence of SEQ ID No: 218, 219, 220, 221, 222, 223, 224, 225, 226, and/or 227.

99. The oligomeric compound of any of claims 1-98, wherein the nucleobase sequence of the dystrophin pre-mRNA is SEQ ID No: 228.

100. The oligomeric compound of any of claims 1-99, wherein the modified oligonucleotide consists of a modified oligonucleotide in Table L, M, N, O, P, Q, R, S, T, U, or V.

101. The oligomeric compound of any of claims 1-100, wherein the oligomeric compound comprises a conjugate group.

102. The oligomeric compound of claim 101, wherein the conjugate group comprises a lipid or lipophilic group.

103. The oligomeric compound of claim 102, wherein the lipid or lipophilic group is selected from among: cholesterol, a C10-C26 saturated fatty acid, a C10-C26 unsaturated fatty acid, C10-C26 alkyl, a triglyceride, tocopherol, or cholic acid.

104. The oligomeric compound of claim 102, wherein the lipid or lipophilic group is a saturated hydrocarbon chain or an unsaturated hydrocarbon chain.

105. The oligomeric compound of any of claims 102-104, wherein the lipid or lipophilic group is a C16 lipid.

106. The oligomeric compound of any of claims 102-104, wherein the lipid or lipophilic group is a C18 lipid.

107. The oligomeric compound of any of claims 102-104, wherein the lipid or lipophilic group is C16 alkyl.

108. The oligomeric compound of any of claims 102-104, wherein the lipid or lipophilic group is C18 alkyl.

109. The oligomeric compound of claim 102, wherein the lipid or lipophilic group is cholesterol.

110. The oligomeric compound of claim 102, wherein the lipid or lipophilic group is tocopherol.

111. The oligomeric compound of claim 102, wherein the lipid or lipophilic group comprises saturated C16.

112. The oligomeric compound of any of claims 101-111, wherein the conjugate group is attached to the modified oligonucleotide at the 5′-end of the modified oligonucleotide.

113. The oligomeric compound of any of claims 101-111, wherein the conjugate group is attached to the modified oligonucleotide at the 3′-end of the modified oligonucleotide.

114. The oligomeric compound of any of claims 101-113, wherein the conjugate group comprises a cleavable moiety.

115. The oligomeric compound of claim 114 wherein the cleavable moiety comprises one or more linker-nucleosides.

116. The oligomeric compound of any of claims 1-100 consisting of the modified oligonucleotide.

117. The oligomeric compound of any of claims 101-115 consisting of the modified oligonucleotide and the conjugate group.

118. The oligomeric compound of any of claims 1-117, wherein the oligomeric compound is not paired with a complementary oligomeric compound.

119. The oligomeric compound of any of claims 1-117, wherein the oligomeric compound is paired with a complementary oligomeric compound to form a duplex.

120. The oligomeric compound of claim 119, wherein the complementary oligomeric compound comprises a conjugate group.

121. A pharmaceutical composition comprising the oligomeric compound of any of claims 1-120.

122. A method of modulating processing of a dystrophin pre-mRNA in a cell comprising contacting the cell with the oligomeric compound or composition of any of claims 1-121.

123. The method of claim 122, wherein the modulation of processing of the dystrophin pre-mRNA results in increased exclusion of an exon from dystrophin mRNA relative to the amount of exclusion of said exon from dystrophin mRNA produced in the absence of the oligomeric compound or composition.

124. The method of claim 122 or 123, wherein the cell is a muscle cell.

125. The method of any of claims 122-124, wherein the cell is in an animal.

126. The method of any of claims 122-124, wherein the cell is in a human.

127. A method of treating a disease or condition by modulating processing of a dystrophin pre-mRNA, comprising administering the oligomeric compound or composition of any of claims 1 to 121 to a patient in need thereof.

128. The method of any of claims 122-127, wherein administration of the oligomeric compound or composition results in increased exclusion of an exon from dystrophin mRNA that is included in dystrophin mRNA in the disease or condition.

129. The method of claim 127 or 128, wherein the administration is systemic.

130. The method of claim 129, wherein the administration is subcutaneous.

131. An oligomeric compound of any of claims 1 to 120 or the composition of claim 121 for use in therapy.

132. Use of an oligomeric compound of any of claims 1 to 120 or the composition of claim 121 for the preparation of a medicament for the treatment of a disease or condition.

133. Use of an oligomeric compound of any of claims 1 to 120 or the composition of claim 121 for the preparation of a medicament for the treatment of DMD.
